United States Patent Application Publication US 2026/0130347 A1 - sequence listing, part 5

SEQ ID NO: 208 - DNA, 28249 bp, Hippotragus leucophaeus
  source 1..28249: mol_type = genomic DNA
agggatgcaaccctagtctcttgtctcctgcattggcaggtgggttctttaccactagcaccacctaggaagcaggcattaaacacatttaattcagagccaggttctagtctcgagcctcggaggccaggagttgtgtaaaaacttgcccttggccaagaagcgctttgagccatgatacatccacagcctttcaggacgcatctctggccgaggactgcccagaatggcagggccaggtccgactgatgctgtccaggcgtcgccccaggggaaaggttgctgcgcggtcgctagagacgggaggagtctggtagtgattgatggggaagggacggatgaataaaagtacttgtcttgggacagcaaggatcctgagcaaactgcagaggctacacggtcaggcattccctcggcgtttcgtcagagccagaccctcccgctgctgaagggaggcgcgctctgctcccgggcagccgggaacccagccgcgcgctgagggaaggaggtccctgcctggtgcgtccggaccaagaggtaaccattctgcttggtgtttaaaccaaatctgtgattgaaccttatcctggggcttcagtttggattacttcttagtgtgtgtgtgtgtgtgtgtgtgtgtgtgtgtgtgtgtgtgtgtgtgtgtttaaacctgtagctacaacagattaaaatgggattggagtgaaggagagggcttgagcgtttgaagtcactcggaggggatagaaacttccgagttaatccagatagagactcttccaatcagaccaagtggagatgtcctggagattttccgaatcagccggcgcagtcctggggtgtgtatggggggtgggagcggtgccgaaggagcccgaccacaggcagccgggaaggaaggggtctgggagtccagacacgcggcatccggggttgctgtggagtcaaatgcggagactggcgatgcccttgatctctaggtgccttgatttcccccgtccccgcgcgtccttggccggaacgaatactgctccctctgcgctcaccaggagctcaaagctttgcattggacacccatcctttcctccccgtcacaccccttccaggataccccgccccactgcgagtcatttacccctcaggggacgcaggggaggaaaaaccagcgaaagctggctctggagggaccgtctagggcgcaggcgagtcccatgcgccagagttccccactcccgcgccagctcgacttattaatactttcgcgcactgagagtgcgggcgctgctgcgctccgggatagcggcttgcaggggcgtggctggggacgctgatctgggtgtcctgtcttccttcccttgctggtctctagactcggaaagctgaggagcggccacccgactccctctggagcaggcagcagcatgcagccgctgcccagcttgtgcggacgcgccctggtggcgctgattcttgcctgcggcgtggcagggatccaagcagaagagagggaattcccgccagccggggccactcagccacttctggggaccggagagatgatggagaccccgactgagacctcctggcccgggaggtccaacgccagcgagccgcgatcacccgcaacaccgcagattcctagagggggagggatggcgggaatcccaccgcgcaccccacccccgtgcgatggacccatagagatcaaggagactttcaagtacatcaacacggtggtgtcctgcctagtgttcgtgctgggcatcatcggaaactccacgctgctgagaatcatttacaagaacaagtgcatgcgaaacggtccaaatatcttgatagccagcctggctctcggagacctgctacacatcatcatcgatatccccatcaatacctacaaggtaagggatgcctgctaggatcgcgatgggagggcgcaccctcgggaccgggaagatgggaaagtctttgcagggaggatcctcaagaaaagccatcccccgactcccccacctccaccctccggccctacacccccgcttccccccgccggccccggacttccaataatcattggaaccaaacacccttctggtttcagtagccccctgctaagcctagaaaaagcatagtccccagaccagcagcctaaatataacttgggaacttgttagaaatgtattttaacaacccccaccccccaggtaaagtttgaaaggtactggtcttgaaggaccttgtccctaaattcagctcacaaaggtatattctctctgctcagagattgatggaccatggactggcagattgttatcacctgaaagcttgttagagctccatgtccaccccagatttattaaatcagaacctgcatcttacaatacctatgtgattcatgtgcatactaaccttgggaaacgaataggtttttagaaaatgaatgacctaagagaaaaagtcccagataggtgagtgggaaaacacagttcatctgctgtgaatgactgtatcgtatctggtttttctttactgaatgcctatgatgggccaagcaccgggataaatatgttacttttccttcctccttctaacaacctatgagtagatatgactccattttatcaatgataggatgctcaaggtctcacaaggagtaagtgatggagctgaggaaaatcaggcccaatctgtcaggttccaaagtgcgaactgcaccgcatcaatttctttgcggacaagacaaagaacactcaactgcagtctgtcacagtttcagtagctaacatcattgtgtgtttaccactggcatcagaggaaatgggcataaagagctagggcaggacataaacccccacatgatttgactctcacttgctttgaaactctgaacatatcctaacatctctggacctcagtgtccttaactctacagtaagctgctgagtgagtgaagttgctcagtcgtgtccactctttgcgaccgcatggattgtagcctacaaggctcctctgtccatggaattttccaggcaagagtactggagtgggttgccatttccttctccaggggatcttcccgacccagggatcaaacccaagtctcctgtattgcagacagacgctttaccatctgagccaccagggaacccaccaactggaattttgtggcattgagaaaacagcctaagggaaagagatggaatattttaaaggactatgcaaatatgtaaaactctgcatccccatcataatcagcaatagaaagtcacccataaacacagaaccaaaagtgtgagggactcagaatgtactttggggatttgcctaaagctagctttgggctcagtacaagggttggggcacggagggggaaggcatgtagggtcaggaaaaggttgtggggaattcttggagctttgtgacaggagaagttaccagataggatgcttttaagttgccttttatgaatctctggaaatcctaatccaaaaaatcatacattaaggaatttgagagatttttaagatttagaaataatatttagattaggagccaggtcctacaaagaaacactcccagaaatgagggataaatagatgaaacgctaacttcctgcatgactaccagttctgatgaactctgaggatttcctgggagaagcacgggctgaaatgagtcccttatatgcagtcccagctccattagaacctaactaacccattttaggagtcctacagaccaagtcttacccttctaatgtggcagaggcattcctcaaacctgacttaagaaacttcagagtacagtgtgttgtgaaaaactttaaagtaagtgatttcttgttgttgtttatttgctaaggtgtgtccaactctttgcaacccatggactgcagcacaccaggctcccctgtcctttaccatctcctggagtttgttcaaactcatgtccattgagtcagtgatgctccccaactatctcagcctgtcacccccttctcctcttgccctcaatctttcccagcatcataagatccttctgaaaagggagattacatctagttttgctagttttatgaaagatctgttaaggaaggtgccaggaaacctcatgtggtaagcccacttagatatcctcctaactcctaagtcagcaggcaggtgaaatcctgtagggaagatagttttgagggcatcagatgtaaatcagctcttcaggaccatcttactttctctgcctgaccaaatgattacattcaataagccagagacaagcctgttcccaaaggggcacacaggttttccttccctttcaaattattttatgatttccctaggaagttacattcttttccctgaaaccattaagtctgttcaacctgtgtttccgtttctgaaataaacaaactaatgagtcattacaaatctggccctgtagtcatccttattagctatgaacaaatccatcacctagaattaggtcctgttgctaggtttgccatcactgaatcctacatagtggcctttggtttgtgtttataatatgcataaatgtgtcacttgagacataatataataataatggttaccatttattatgcactgtgtacttggttttgttcattttgatcactacaagaaagcctatggagggagtattgttatcacccctgtttgatggggaaattgcattttcaagagatgaagaagtaacttgcttgatgatgtcataccactagaaagtgatgaaactagggcttgaacccaggccttctggccctagaacctatggtcctcccatcctgcacagattgagctgctcacagcatgacctcttccaacctggaatatggttaggacctcattggagtataatggtgcaattacatcatgatatactaccacacagtagtctacttgggaagcattttcagttttaatttcataatctagagatttctatctgctgaaattcccctcagatgatctataatgtataacattgataatatcactatttgttattttaatgtctttatttataaaaacattgaatccaggactagttaaaagccatttatttctttaaataattgtgtcactatataaggaagttttaaaaaatgcatttagaatttcacaatagtcaagtattatactttacacaaaggaacttaagtgaattatgagtgtcgtttaaatttagcctaaagtgggggtactctagtgatttctaattttgtttttctggggtgttactagtctcttgaaaatccagttttaattatctatgttatatgctatataaattaatatataaatagataatttatgtatgaaagaaaaagtgttagtcactcagtcttgtccaactgtttgtgaccccatgcccaccaggatggaattctccagacaagaatactggagtgggtagccctttccttctccaggggatctttccaacccagggatccaacctgtgtctctctcattgcaggtggattctataccatctgagcgttataattaatacataatataatatacattcacaatttctgagggttcatagaatactgcaactcatctattggtttacccagggtatggaaacttcaacatgaatctgtaactttaacctggagttcagtgcttccctagtagcttggacggtaaagcgtctgcctacaatgcaggagatccgggttcaatccctgggtcgggaagattccctggagaaggaaatggcaacccactccagtgttcatgcctggaaaatcccatgaaccgaggagcctggtgggctacagtccatggggttgcaaagagtcagacatgactgagcgacttctcttcagtaattctagagtccaataaagttgacaaaccacaaaatgtcacagatttggctgaaagccatgctccttgatgcagctgtagaaacgggatgggacttctcagggagggactgctgtgagcactgacaaacctcagagcatgtgtctcttctgcctcaactgtttcaaagaactgttctctggaaacttctagacagagtcagtcctctcaccagggctcctatgtcagggaggaaatcctgattgacagatgttgtgggagactcagcaaattgaagctcgaaaggggcttcagataggcatgtaagcatgctggaaataaaagcttatgtctccttttcagcaacacacactggggctgtcattatattacgtaaaagcatctagatgagaatgaaatgcaggcatccaaagaggtcctttgaaaatatatgtgtatgtgtatatgggattccccaggggctcagcaataaagaatcctcccgccagtgcaggagacgcgggagacgtgggttcgatccctgagtcagttggaagaaggcatggcaacccactccagtattcttgctgggaaaatcccgtggacagaggagcctgccaggttcccatccctggggtcgcaaagagtaggacagggctgaagcgactgagcacacacatgcacatatgtctttatacacattcatatgtaaatgcattataagtagataggtgaatatcagtggtcccagttcctggtacaaagtcaccaagtaataaatgttactagaatgtgtgagagagtgtgtgtgaataagaatggaaattgttttgtttttcagcttttgccattataaacttgactacaaataacctttttgtatggctttgtatgcatgtgtgactatagttgaaggataaatttctagaattagaatgattgaatcaaaggatatgtgcctttgtaattttgatagacattgctatactgtcccccaaagttattgttgtactcttagtttgaatcacgagtttatgtaagatgttacaaagctatacaaagatgttatttgtagtcatgcttataatggcaaaagctaaaaaaaacacacaaaaaaaacagtttccattcttattcacacatatactcatacacattctaataacatttttacttagttacgttgtaccaggtactgtaaccagtaatattcacctctctacttatctatacatttttataacatttaatatattcacatattaatatatatatacatatatgcttacatatttttaaacatcctctctggatgcttgcatttcatttttcatctggatgttcttatgcaatgcagtgacaaccccagtgtgtgttgctgagaaggaaaaataagcttttatttccagcatttcacatgattatctgaaacccttttagagcttcaatttgctgagtctgccaccatatttgtctatcaggatttcctccctgactcaggagcccttgtgaaagccctggtcagaagccctctttatacaggcttccctggtggctcagacattaaaagaatctgcttgcaatgcaggagaccgcggttcaatccctgggttgggaagatcccctggagaagggaaaggctacccactccagtattctggcctggagaactccatggactgtatagtccttggggtcacaaagagtcagatgcgactgagagactttcactttcatatatatatatatatatatgaaaagttaaaagtgaaagtgctagttggttagacaagtacaattctttgcgaccccatggactgcagcccgccagtctcctctgtccatatatattcacacatatacatacatatatacacacatatatatgtatcaatgtctatctctaaaatataacatgaatcactatgccagtatttatatgggctatgtatgtcttaagagtcccttggactgcaaggagatccaaccagtccattctgaaggtgatcagccctgggatttctttggagggaatgacgctgaagctgaaactccagtactttggccacctcatgcgaagagttgactcattggaaaagactttgatgctgggagggattgggggcaggaggagaaggggacgaccaaggatgagatggctggatggcatcactgactcgatagatgtgaatctgagtgaactccgggagttggtgatggacagggaggcctggcgtgcttcgattcatgggtcgcaaagcgtgggacacgactgagcgactgaactgaactgaactgaaccgaactgatgtactgacccacaaactagtgtttaagtatctgatgggagggtgaatctctccttattcacaaactacttattgtgtccttcttgtaagactaaaatgaatgaaataatctagatgtttgttgcctatagaatcctggagtagcaccaatgtcaaagttgcataggaaaagctgagtgtacctatagatcctgtgaagttttatgtgttgctagtgattgattgattagttggtttgctttgtttggattagcagtgatatttttaaaagccttgcattgaaaatttcttcaacttctcttaacatctcaagaagttaaaaatgcttgagcaaatatcaaacttttaaatcataacaaattcactctctttgtgctgtatttacatggataactgagttgatatatatagttagcataaatatagtaaataatagagatatagtttcctctgtgtgtaagcaaattgcatttactattgtcccaggtggccctactggtaaagatcctaaaggtatgagacgcagtttcaatcccaggtcgggaagatccctggagaaaaaaatggcaaactgctccagtattcttacctggaaaattccatggacgttttttttcctagagggctacagtccatggggttgcaaagagtcaggcacaatagagcacacacacacacacaaattgcgtttgaaaacaaatctccttataatctgatgacagatatctacatggacattattttgataaggatccaagtataatctgatgtctaatggctgtggagagctttctaaaaattaagctggtgacctatttggagtgcctctagatggttttattattaagactttggaggctactgttggaggcaaagaagctgccttcataggtctgagaggcaaaaaccactgatctttaacatgtaactacttcaggtggaatacatataacattaaaatgctggtatgtcaaaatgggaattgcttcactgagacctcaaatgagttttgagtgaaatgaccttgtagtgactttgtcagtcaggctttcctgcttgggacacaatcaaagctatatttcaatcaaaagcacctttctcacttttcaatcttagactacttctaacacttaacaagtctgtgcatgattaactagtttcatagttagaagtagaagtgaacagagcaccatcaaatttaactttcgaagttatacttctctgattaataaatggaagtttatgtgtatagcgcaacacaagaagtaaagatatcacggaggtggttgttgtcattgtttagttgctgagtcatgtctgactcttttgcaatccccaggactgtaggccaccaagcttctcattccagaagatttcccaagcaagaatactggagtggggtgccatttccttctccaggggatcttcccaactcagggattgaaccagtgtgtcttgcattggcaggtggattctttattgctgatgcaccggggaagcccctgacattgagtaggcgagtctaattttgcccaagataacaatactgttcatatgtccagttaagtaactatgatattttagtgacattttagtaatatctggagatatgttagggttcaccagtggctcagtggtaaagaatctgcctgctaatgcaggagatacaaatttgatccctggatcaggaagatcttctggaggtagaaatggcaacccatgccagtattcttgcctggaaaattccatgtatagaagaacctggcaggctacagtccatgaggttgcaaagagtcagatacaactgagcacatagagatatgttagtagaagaagcattttgtacctagaacagaacctagatacttctgagattcatttatttaaagcaaaaaaaaaaaaaaatttaaggatcaccaattaatcatattttaaataataacattttaaaagtattaataacaggtaagactattcgttctgaataaccttgagtcaattaataaatacaacactccaacaccctgtaacaggtaactgcagacaaatgcttgttgacagatgttctactcatatttttgtaactgtccaaatgaaaaagaagagatttttgttcttttttctatatatatatgaggctattggccattgcagaataagaggccaatgttactgctgctgagtcgcttcagtcgtgtctgactctgtgcaaccccatagatggcagcccatcaggctcccgcttccctgggactctccaggcaagaacactggagcaggttgccatttccttctctaatgcatgaaagtgaaaagtgaatagcagatgtcaaataacccagaaactcaacacttcctagttctgattcattgcttcacattttgcccgtggatgcctgtgatgaaatgattggcaaacccttggccatggacaatggaaggtttcccagggttaactctatgattcttcttgtgtttgcctttgatctgtcactcggtcactccataaatctaaggctcttaaaatgtcaaggcagtgtctttttcaacatggtaaggcttatccatcaaaggctttacatttttttctttgctcattttaaatgaatagttcaagactgaaggtatttccatagttgtacaagaggatggtacagccaagaccatgttgtttcgaagccagggagccagggagccagggtcttcattctctaaaggcaaccaaataaggttttcaccgtgtagctaatatgcaatggttgatgatctttagagaaacatgcctactggtaataaatgattaagttctctcaagggtgttgacagatatagcctgagctgaaatgcaattctagatataatttatgatgtgaagcattttctttgaggactttgcaaagttaagaagaggttggttatgtctgggagacagctgagcatggtatatggatgtaccttagccagcaaattctctaattttagactttttttttctttccaatgcttttattttagagatttactatttgtctttcctaaaagatcctctggtgaaaatggaaaagaaataataaaatggccaaaatgcagtgtagaaagaagagagaatgaggattgttcttgagtcagaaagtattagcagggacttccctgggggtccagtggttaagactttgtcttctagtgcagagggtatgggttcgatccctggtcagggagctaagatttcacattcctcgcagccagaaaaccaaaacataaaacagaagcaatgctgtaacaaattcaataaagacttttaaaatggtccacatcaaaaaaagaaagaaatatatcagcaaagttgactgaggcattttgtccccaagattcctttccagacatactcgtgccttctcaccttgtgtttctacttctctcctccttagcttcattttactttccagaaaggggtaacccaattctgtgggtgttaggttctatatgtctccttccccctcacacagtgtttttaatttatattaaagagcttttgatttccatagtaatcaaatgttttctaagcacagattattccataaaccattctctggatagaattaggttcaagtaagacatgaaatgacttaataagatttgttgaatttattaagtttgagagtcactttctgagccatgagatcatcaggttataattctttagtttctttaggtgtcacagtgatcttagaagattcagctcagagaagtgaattgaccataaagctagatttgtgaatagcatttcttaatgctcttagttgaatcttttcaacacatgtgacatgtcaatgaaagcttttaagcacaaattgaggataagttttcaggttcagatcatagaagagtagccatccagttatttattggccttttacagatgtggaaataaatttcattgtaacccgagaagggatatatatttaaggtgaagttgatttactcctaagacatatttatatttaaggtgaagttaatttactcctaagacatatttattttttatctttttattctgtctctttgctgctctcagagcttttgtttctagaaacttaactcgttttaatagagtcgttcatctatttcagccagtcctaggaaatcttttcagagcagtggaaagccctttctttgctgaagtgcacacaacagagtcctaggacagggtctctgtcttacacaactcctgggggtgctgttcatactgtagtctatttaaatggctgctgctgctaagtcacttcagtcgtgtccagctctgtgcgactccatagaccgcagcccaccaggctcccccatccctgggattctctaggcaagaatactggagtgggttgccatttccttctccaatgtatgtaaatggcacctctggcctattctttaagtgattaagttcattttaatggatgtaagatggaacttgtaattggtatttgtccccagggcacaagtaccatgtaagtcaagaaaatattttctgtgcacttgaccagcagcttaaactctcactgtactttttaaaattaaatttatttatttttaattgaaggataattgctttacaatattgtgttggtccccaccaaacgccaacatgaatcagccataagtatacctatgtatcctccctcttgaaccttcctcccacctccctccccatcccacccttcaaggttgtcacagagctccagtttaaattaaagaaaaaaaaagaaagagagatcaatgggataagggaaatccttgaatgagggtgtcttatcttattaaaacgcccgttcaaatgcagaaaaactcttatctgccacaggaaacagagataaaagcagaagaatacacccttccccaaacttgtgaaacacagccgctccattatttccttcttttgactctgactgtaaaaatatttctataagatcagtcatttgaaagaaatgttcacagttcatcaccagatggaatgacagcagtctggcaaagtaaccctggttgtcacttgtaatgcgttgctcacccaccttcctgaaagcgtctctgtgctttctgcattcatctccgccacgtttacaaataacacacctcataggatcccatcagatagtgagaaatattgggttctgttttataccagtcatttccctgacacgtttgaggaggagagagagagggacggggaggaattttgctttccactttttcctgtctgcttggcaagcggaactcccagagaagagccaacgcctcatttccggaggccctggctttatgtgtcaagaagacttgatctatctggtagggaggaggacctggactagacagtacaaaatcaatcaatcagtagtaagcccagtcatctcaattctcagaagaattgtttcaaatatgggaactaaaaagctcatgacaagtcttaatacaagatgtctgtcttatgatcaaattcattcagtcatccatgaactcattcattcatcattaagagccaactcactggaaaggaccctgatgctgggaaagattgaaggcaggaggggaaggggacgacagaggatgagacggttcggtggcatcactgactcagcggatgtcagtttgagcaaactctgggagatggtgaaggacagggaagcctggcatgctgcagtccacgggctcgcaaagagtcagacacgacttagtgactgaaaaacaacatttaatcagcagtcactgtgtgccaggcactatgctagccactaaaaatgttgtagaatattctgaaactaagaaccagttaaagctcagtgcatcctgttaatttttttgaaaaatagaaaggagaatggtggttatggttaatgagacaattgaacatttgttagtgcaagatggttaactttggcatttcctgaccctatgggtctagattccattaggtattaagaatggtatctactaataggattttctccatttaatttgtcaagaatgtaatttttaattaaaaaaggaattggaaaatataaatttccccagttggaaagattttgtaggactcatttagcaatacctttaaagaaaagacattgattttctattcacaatgtttatccttttagaaatttttaaaactatgtaatataaaaatatgtatatactataatagtatatagtacatagtataagctatgtactataaaaataattttacaatatgatacgaaattttgtagtattctgttgccttttttctttctcaaatagctgtttcaacataaagttatgaaatcatgggcatctttgagtagaaaccttatagtcagtattaccatgactgttttcaatctagtgtttatttgtttgttatttgtgtttatttatacaaaagaaatgtgctagcaaagcagtggaagctttaagggaaagaggcaagcttgaggacaggctatcatttgtcaaatggacactacattgctccaaggaacaatactaacaaaagctctttctcaaatgagccatcaccattgcaaaccagtgtcagtaatgggaatattttctgactggctcacatttgataaatggtaagtaatatgtattcaaacttaattttaagcaggccccaaacatttaagttatgtggcagggacctagaaacaatattgatccctgacattttttttgcaatcagagagatttgattacaggcatgatttgtcttcagtactcagattttgcccttaagttatctaactgaatgacgaaaactgcaaataagaaatatgaatgtgttattgctaggtttaaagttagacttgcttcttcttgcaataaaagagaatccgtttcctctaccaaaaggaaaactgaatcgttgaacttcagattataggcattggatgtcattatttttgtcaagaaatagtgaaataatttccaagaattatgaaaacctgtaagaacattctttcaccagattttaaagtggcgtcttggttgagattgatttttttttttttaagttcacagcttttcctccactcagggcaagagattaatgtctttgcattcttaataagctccaagccctaaattgccaagacattctggatggaggccatttaggcagagatgagcatcaacagtaagcatggtctatgtcacagatcaggcttctcagcgtctccacaaagccttctgatgagagaagcagagattgccaaagtcatcctgactacgaaataatagaaatgtgcactcaatccctcaccttctgtggcctctcaggactggcagcattcatgtctgaactgaaatcatgaagggttttttggcagtctcttttcctttggaagggtagattagaaaattgtaatctgtcggttgtgattaagttgctaactatctctgtgttgaacttgaagagaattgctacaattttcagtttgtgtttccctgtcccctgtgataacttgggtcagaggttggactgcaggcctcccagtggtatgaagagcaatcatccaatgtctagtctgagccaaaagcaataataacctcaaaacagagcctggattcaacacagaactcaatttccattggccagacgtctctcccttcagtgaccagacattcattttgactcatctaatgactgtaccctgtgatactcacatttgcatatttagagattgttcaagacaataaaataattgaaactatctgaatttttggacattagataaaatagctagggagttatctattacttacctaagtgagcatgtgtgtgcgtgctaagtcacttcagtcatgtccaactctttgcgaccctacgtactatagccctccaggctcctctgtccatgggattctccaggcaagaatactggagtgggttgccatgccttcttccaagggatcttcctgacccagggatcgaacccacaatatcatgtctcctgcaatgacaggtgggtccttgaccacaaacgccatgcaggaggcctcacataagtgagtgaccaaggacaaatatattccctggtatctcagttggtaaagaatccacctgaaatgcaggagaccccgggttgactcctcggtcaggaagaaccgctagggaagggataggctacccactccagtattcttgggctaccctggtggctcagctgataaagaatccacctgcaatgtgggagacctgggttctcctgactcagggtctctcacaagggccaagttattggcagggctgcagtcatgagaaggcttgtccaaggctggacacttggcaaatcagtgccagctgttttcaggtggcctcagttccttttcatgttgccttttcacagggacccttgagtttcctccttgacatggtaactccctcaaagcgatgatctaagagcgagcaaggaggaagccagaatgccatctatgaactagtctcagatgtcaggcatcatcagtcccaccacattctattcactaaatgtgaatcattaagtcccccccccccccgccgccaactgccccagcttcaaagggaaggaaatgagcttcaccttttgaagggaggactgtcaaagaatttgtgggcatgtttaatattggagtgggtttccatgcccttctccaggggatcttcctgatccagggattgaacccaagtctcccgcattacaggtggattcttttactgtctgagccatcagggagccctaaaaaaccaacacagcaagttcataaacttctaagtacctctaagtcttttaacctattaaaatgcagatcatagtaatttaccttataggattgctttgggcattcaatgatataccataggtaaatggcttagaatagtgcctaacccattgtaaatgttagttttcctttttcttccgcctctgatataaagacagaatgattagaaagactatcacctagatgcagtagtttataccaaactatgtctggaaggattctttcaactggttggaatctttttattatgtttgcaagggtgattggcaagtcaaccacctcgagcttgtcactggttcacatttgccagatcctgggtcttctacacttctgtcaacgtcttcaccattcatatgatcaacttctttgagtgttctggctcctcgcatcttataaccaacccatcaacaagtcctgctagctctgttatcaaaatatatcctgtctataatctgttctttcagttgcaaggcaccacaagtttcagcccatgatctctcatcaaatttcttttcttgactattctagtctatcactgtctatctagtctattcatagtctactgttccaccttctagtctatcttgagcatccagagtgatctttttatgttttagaataagaggggttttggtgtttgtttgtttttgttttgtttttttaatatggaccattttgtttcaagactttgttgaatttgttacaatattgcttctgttatttatgttctggttttattagccataagcatgtggaatcttagttccctgaccaggaatcaaacctgcaacttttgcactgaaaggtcaaatcttaaccactggatcaccaggaaagtccctggagtgattttttttaacataaataagataatgccatctccatgttcaaaatattgcaatggatttcctttttaaaaaaaatcacactcctccctctaactacatctagactgatctggaccactccagtcagccttaagaaccttcttttcatctcttcctctcactaggcttattttgacctcagttcagttcagttcagtcgctcagtcatgtccgactctttgcaaccccatgaatcgcagcacgccaggcctccctgtccatcaccaactcccggagttcactcagattcacgtccatcaagtcagtgatgccatccagccatctcatcctctgtcgtccccttctcctcctgcccccaatcccccccagcatcagagtcttttccaatgagtcaactcttcgcatgaggtggccaaagtactggagtttcagcttcagcatcattccctccaaagaaatcccagggctgatcaccttcagaatggacttgttggatctccttgcagtccaagggactctcaagaatcttctccaacaccacagttcaaaagcatcaattcttcggtgctgatccttcacagtccaactctcacatccatacatgacaacaggaaaaaccatagccttgactagacggaccttagtcggcaaagtaatgcctctgcttttgaatatgctatctaggttggtcataactttccttccaaggagtaagcgtcttttaatttcatggctgcagtcaccatctgcagtgattttggagcccccaaaaataaagcctgacactgtttccactgtttccccatctatttcccatgaagtgatgggaccggatgccatgatcttcgttttctgaatgttgagctttaagccaacttttttcactctccactcaggacctttgtacttgctctttcctctgcctaaaatacagtctgcatggcttactcttttattttagtcaaatccctactgaaggttgctacttgtgagagagacctgactggtggtgcaggggttaagactttgcttccaatgcagtgggtacaggttggatccttggttgggaagctaagatcccacatgcctcatggccaaaaaaatcaaagcataaagcagaagcaatattgtaacaaattcaataaaaactttaaaaatggtccacatcaaaactatctttaaaacaagaaagcacccaagatttcattacaatttctcagttaagttcagttgctcagtcttgtccgactctttgtgaccccatgaactgcagcacgccaggcctccctgtccatcaccaactctcagagcctacccaaactcatgtccattgagtcagtgatgccatccaaccatctcatcctctgtcatccccttctcttcctgccctcattctttcccagcatcagggtcttttccaatgagtcagctctcttcacatcagctgccacaaatcctgtgaacaccatattaagtatttaggtattctttctctgcttccctcactagactgtaagctccatgagagcagggagtttgccttgttcactgataggcccccatactccaaatggtgttggcacatggtgggtattgaatacatgtttgttgaatgaataaatgaataagcagagttatgagccagcccattttaatccagaggtcacaagttagaggctggtctgacacataaaattattttgttaacattatgttattatctgttagtgtttttgttttttcaaaaatttgaattagttgacaatttttataaattgtgagatttatatgaacatttggggataaaaatcaagatattttggtattggggatttcttatcagcaatcacatcatgtttaattagcacaggctccttttagacaggatttaccctagacccctctgcccgctattatttcctgacaccagtgactttcttgcacctagctgccttcactcttgtgtgatctgcctggccttgcaggctttccgaccctagaaaaagcatatttgctgtaagtttgccaacatttgtctacatgtcggtgtaatttttcatatctatcttagaaatgaaattggtctcatgctggagctctgagtcatattcatactgagacacacatttcagctttgggtgccattctagttgccaaacagttacccagcatgacaaactctacaaagaaatgttacaagtagaagaatggaaagacttaattatgtttcaaactagttttcaactttggaaggttattctttgaaacattaaaacacacataggtagatttaaaagtttcttttcaaaccacgtaaacatttgacccaaatgtttaccgaatgtgattcatttacattgtgtgtggggcatacccagttgtcctacaaaagaaaatcatgagtttaacagaagatggctgcatagttagtttgaaatagaaatgtatgtatagtagcaagaactaagtcattttgctcactgaataaccagtgcctatgtattttagggacttgaatacttaagcatctactgtgtgtcaggaactgtgctaggcaattgcagaagttgtattctgtctgataggctaggagttacagacagcaaaaacttaacaaaacaaacaagtatactatactatacacaataggagttaataagtgctgtaggtgtaaaggaaagtggagtagaaagatggagatggggaggtctgaccatttcctatccttagcagtgtggtcatattgaaaagatgagacttgagcaagagctaaaagaagtaaaggttttagccaagtggatttgtgtggagaaagccttctgggagaaggaaagacgctcaggtgaagtcttaaggaagaagcatgccttgtgttgaacacattctggacagtgtgctgactgacagtgcagttgaccagagtgaagagtaaggacactaacacacattctgttctccataggagtcatctgtgcttagttgcttagttgtgtccaactctttgcgaccccatggactgtagcccaccaggctcctctgtccacggggattctccaggcaagaatactagagtgggttgccactctcttctccaggggatctttccaacccagggatagaacccaggtctcctgcactgcaggcagattctttaccagctgagctaccagagaagcccagggagtcatctagtctaaccaaggaacacttctcacctatttttgactaatctttattttgatttggccataaactgagcattggagacttcataagagaatgagaggcattttcagcactacaggctcaacttaaattttttttaaaactggaatataattgttttacaatgttgtgttagtgtcttctgtgcaatgaagtaaatcagcaatatgtatacatatatcctctctctcttgagcctcccttccactgcccccaccccccatgccacccctctaaatcatcacagaagactagtctgagctcctggtgctatacagcagcttcccatttttgtaaggagaacttaagcaattggccccagttggccctgcagtagaagagaccttgaccctaatctcctgttcatgtgtagctaattctcctgaattggctgccctttcatgattgccagcccactctcttattccaaatatctaacaaatgcaggtggttttcagaggagtgcatgagaaaaagaactggaatttgttattttactccacaagctcattcacctccactaagtaatacatacagttcaagagcactgtgtgaacatctccctaacagagctttgtgtctcctcgatgcagctgctcgccaaggactggccctttggggttgagatgtgtaagctggtgcctttcattcagaaggcctccgtgggcatcactgtgctgagtctatgtgctctaagtattgacaggtaagagcatgtatctaagcaacatatatcctgaccacaatcctagtggttgctacattacttagaaagtaaacgtaattcagtaaaaaccaggctctgccagcttggcaactgattctgttttgttcttcagatatcgagctgttgcttcttggagtcggattaaaggaatcggggttccaaaatggacagcagtagaaattgttttaatttgggtggtctctgtggttctggctgtccctgaggccatgggttttgatataattacgagtgatcacataggaaataatctgagaatctgcttgctccatcccactcagaaaacagcatttatgcaggtaaattttacttttctttcccttttctgctcttgccttataaatgttcagctattttcccccaatctcctcttcttgggaaattattgatttgtgactgtccttggcataaattaaaagtgtaggtcccaggacctcagggttaacagcaggactaatgacccatgctacaagaagctaggtcattacttctccaagaatcccctggttctcaggaatacagataagccacgttgacataagagaatcgattggaatttatagctttcctactcaaattcacataagaactggcagctacaacatattttgcattaagcaacacagcagtcattggaggcagagtgtgcttaaagggatgatcaagtggaagtcaccctggtatggatagactggtagaaatctacgtgactccatgaatcttggtatgaatttcaagcctgtcctctctctaaagggaaaactaccattgcaaagaacttcatcttgtctatttatttaagagtgtttaattaggaaatgggggaaaatagcaatgctggtcatcagaaaatagaccctaagtgaaaaaagctcttcccaacagaaagggtgaggaggaattaatgcaaagggagtgggtccatatgtcacaaataattattttctactttacacataagtttatataagactttatgtatatgtgtatagatcatggtaaacaaaagactaaagagttaatgggaaactaaaaatgaaaatgctgtttccttgtttcttattagttacagtggaaaaagtattgcatgggtatgtgctaagtcgcagtcatgtcccaatctttgcgaccccatggatcttactccaccaagcacctctgtccatgggattatccagacaagaatattggagtgggttgctgtgctctcctccaggggattgttccgacccagggatcaaacccacatcacttatgtctcttgcgttggcagacgggccccttaccataagcactgcctgggaagcccaaagtactgcatagattccataacttctgttccaacagagacatacctggaacaacaatctttaaaaggaaaaggaaaaaagaacaagtaagagaggagcaattttgatttttagttgatagtttagatgtatacatccttgagctaaatgattactatagacctcttcctacctgctttccccagaaacaaacttgttaaaaagtgagaagttccccaaaacactagaatatctttatacatccaaatgtggtaaggaattcctttcacttatgtgaagacaaaaatatttgagtatttaaaatgttgcccaattgcttacatttctatatataattatagcacactgccttagagaattgaaacacctttaggaaaagtttgtttcacttaatttaattttttgttcagcagacaaaaagttctacatagtagaataaagattctactgaaagactctacatagtatttataaaacggatctgctttagaagattattccttgatgagcatttttaaatatttggtatgtaagattttcttacagaggaatattaactataacatcctttcttccccttagttttacaagacagctaaagattggtggctatttagtttctatttctgcctgccattggccatcactgcattgttttataccctgatgacttgtgaaatgttgagaaagaagagtggtatgcaaattgctttaaatgatcacttaaaacaggtaaggaaatagaaatatttgctgactcatgattacaattccaattatgaatatgaaaattattgtagtgataataaactgaaagtatcatctactagagcataattgctttttcttagtctgatatttttaatatgttttatactatctacctggaggtatcctacacaatctaaaggaatgtaaaaagagccatcacttttttagagaaaccattttttattggagtataattctttgcagtgctgtgttagtttctgctgtgcagtgaagtgaatcagctctatgcgtacatagatgcccccgctcttggaccttcctctctccaccgcccatcccactcagctaggtcatcacagagcactgagctgagctccctgtgttatactgtaggttcccactatccatttacacatggtagtgtatttatgtcaaatctaatctcccagttcgtcctaccctcctctcgcctgcttggtgtccatacatcctttctctatgtctgtgtctctattcctgccctgcaaacaggttcatctgtaccatttttctagattccgcatataagctgttactttttaaagatgaatctctaggatgagaggaaagcccggctagttagggggtttgaaatggacatgtacgcacggctatatttaaaatgaataaccagcaaggacctactatattagcacataaaattctcctaaatgttgtgtggcagcctggatgggaggcgagtttgagcgaaaagggatatatgtatatgtatggctgagtccctttgctgttcacctgaaactatcacagcattgtttattggctataccccaatgcaaaatgaaaattttaaagaaaaagatgaatctctagtcatttaggttctaattcacagtaactattattcagtttaaaactctgtattctgaatttttacaaatgccactgactttttgtaaacagtattaaacattttgtttggaaagaaagaatgctgtgattataataagccatccattacagagtctgattgtggttttatttcagagacgggaagtggccaaaacagtattttgcctggtccttgtctttgctctgtgttggcttcctcttcatcttagcagaattttgaagctcactctttatgatcagcatgatccccgtagatgtgaatttttgaggtaagtaaggtaaaatagaaatagttgtataaataaatgccattcagaagtttttccattgattcctttcattggcaggaagagagagtactatttttctaatcctaagggagcaatttaagatgctcccccacccctttctttttacttttacttctatttccaacagagaagtaaggggagctttggagaacactgagaatggagagccagggatgtccaagtgagtgagtgacatgattgaaaataccagatctggttctccattgcactttgtaaatcctttcttttttagacaacctgggcacttacaaaatatatttcattttaaggcagaaaattgagcatgggagtgggaatagggattaaggatatgacagggacagagaataagagaaagagagagacagaagcaaagagaaagagagagacagaggcaaagagaaagagagagagacagagagagatcaaaatcagcaaagactagtgataaagtcaaaataattataaatgggtaatttttaatttataaagtaccaaaatctgtaaaggatttgtgctcacagcacataaataaatttttgtattatttttgcagctttttgttggtattggactacattggcatcaacatggcctccctgaattcctgtattaacccaatagctctgtatttggtgagcaaaagattcaaaaactgctttaaggtaagagagtatttgaaaatcaaaaacccttttaatctggtatcaaatataacccttacacattattaatatttctaaccagagagatctagtcaattgttttataattttcccttgtattacatgatagatgattctttaaatataaattttgctcataaatcactatgattgatttctccctacaaatcccagtcaaccattcactactgcctcaaccaatcagttttactcatagaattactcagaaaatgaataaaaaattatatgcattgatatctgaatgctatcacatgataaaataagagctacacatgaattaaatgcactgtttccctatttggaagattttggactaggtaacacactgccaattataactaagttagtctccttttcatacacaggtgagaattacaagtcaaacaaagcagcttaattcaagttctaccttcacttttttgccttcattcgatagcagtattccttgatatagaatacatgaaattattcctcatttggctgcttccatttgtgtgtaacatccatccattcattcactccttcagttacctagtatggaataaaatattccttccccttatatccacttgttcctagtgtaaccaaacccaggttggctgcttgctgctcatacaccaataattccagaggcaagtgttaataaaggagaaaaatggagaaaaatgctttcatcagaaaagccagtaatctagggagatggtggacttgggtccagagaccaactccaaagattctgttcagtcacaacaatttttaaagggaaaaatggagggagaagaatctcagtgaatcatctaggcagaaggttgggctctgcctctccatggaagacagactgtctggctctgtcttcagatgttatcttgccaagtgatctgctcccaggattccttgcggggactgctgtgggtgccgacctagtcctgcttctttttatctaggagaagcatcaacaggttagacaaggcatcttgtgcactcagttgagcagtaagtcaggagttagtttcaattgcttagtgatcaaatccctaggggtgtgttagttgctcagttatgtccaactctttgtgaccccatggtctgtagcccaccagcctcctctgcccatggaattctccaagcaagaatactggagtggattgccattcccttctccaggggattttcccagaccagagattgaacctcagtcttctgcattgcagtcagattctttatcctctgagccaccagagaagcctataattaggttattttaaggttagaagtgaacagaaataggcaaacaggaaagggacaaaggagctgttttcagttccccactgtcaaccaccattccatttctatgggattaggggtgaagtcctagggcaccatattctcagaggggaagatgtcaacatgggtttgtagcatctctttgctgacaattctagttgtgtacttaaatatatgggcggaacaagctacaattattttgatgcccacaaagttacagattattatgtatgtgtgggtatggtaatatttccacttgcataggaaaaaaaggtttgagtgatatatttattaaatattaagagtatttctcaagtaatcaagagtaagtatccaagaattgagtgtctttctatttcattttaattaaaagatgaagaagtgttatatatacatttttctttggtgtagcttctagtttaaaaaattatcaaatactacttctgtagttatatgtttttaaggggaaaataagagggcatggcaagaaagtggcccaagaattgctgttcatgcagagaaagccagaattctggtgagcagggagggttgtgatagtgtaacttgatgtaaacttataacaaagttactttgttttgtacagtcgtgtttatgctgctggtgccaatcatttgaagaaaagcagtccatggaggaaaagcagtcatgcttaaagttcaaagctaacgatcacggatatgacaacttccgttccagtaataaatacagctcatcttgaaagaaggaatattcattttctttattttggacagaaatgattcaaacaaagaggtgtctgccaaagtgaaacaaaacaacgtgtgtgtttgcacaaaacaatgtacaaatctaagagtgattattttcttcacactcaagagttccacatgacatttgacgagctgtttccagcatgagaagacaagcagtgagaattaagaaagcctcattgtgaaagcacttaattctttacagttagcacttcactatattatagctcttcagaacttctggtctattcatacaccacttacatttaacttgagttcactcagaattcctgtgaaagatgtttatttttgtaaattaagatgaatctgatgtaaaggaaaaaagtgtcactgctaaacagaatttttagatgaaatttaaattactcaatttaaaaattttaaaatcttttcaagtttcacacctttggtgggactatatttggaaacaacacgtgaaaatagttca

SEQ ID NO: 209 - DNA, 98680 bp, Hippotragus leucophaeus
  source 1..98680: mol_type = genomic DNA
gagggcttggatggtaccattccccatttttggcccccccaaaagagttggagccaagacgcatgcagtgggtctgaatcggcacaggacaaaaagaaggcgggggaagagtgctgttcccaagagtggaccaaagatgttcaacgtcctgtgtcagtatcaggaactttacctagctgaaatcaaatgtttatctgttgagtcattacaatgtttcttcatgtgactcttagtcctcagacacgatcaaaatgtgctatgatgaggcggggacattccacaaaggatgactccatcttcagtaaccgggatgtcagatgacacttccccatattcctatgttagttctcactttattaggaaatctttatctgaaatggtgcagagctagtgagatcagatgaagttgcattccttcctgtgcttgtctctggttggctaatttgtcctcctttcacacatgaaccagacaggaaagaacggagccaaacccacattgttatgaatgaatttctttgcttttaatctcacacagtttaaaatacaatatgaaatcaggctacagtatataaaaaattctccagcaaaatgatgtgccagcatcagctactaaaataaacgaacgaaaaacttcccccataagaaatttttttttttgcatttaaaaaaaaacacatagacacttacatcgctacatctctaagctacctcagttctgattttttaaaaagcacctgcttttccttttttttttaatcttgcttttaaattttcagctcttaaaaaatataaattatatgaaaatacaagttggaaaatagtcaaacacaatataacatctttttcacccctatacttctcagcttaaaaaaaaagtattctaaaaaaaaagttcaataactgaggcagtattcctgatagagataaatttcattttaatatatatattttatatatgtatatgtatacatatatttatggttcctcgaaacttctttggaatgtagattaagagttcaacccatttatatagaccccaacagagacagcagcatgcacagcatgactaggatagagaaggtgtcgttttcaccatgaagattaggcaggttaatgctctaaaacccagagtgttcagccccaaagtgaggaaaagcatatctgatctctgaatgttacctctaatctccatagccaaaaaaccagggctctgtgtagggaagtccctcccctgaaagcgaaagggaaccaaagtgactctgaaccctacagcccaaaccaacatgggttaacagatgcatctccaggaaaacagagtttcacccaactcaaccagatttgcccatccttcctctgaagttaacatgtgtttttttgtgtgttttttgtttttttttttaaagcagaaatccaacaattctgctccatttccagtgtataaaccacccaccactcttcctgggatggtctctggacagaaggaggaaaaaaaaaaaagcatctggccagattgacaaagctgtttgaactaacacgctatctacaaatactggaaacagtggactgggagagagagccgggcgggggaggggggtgcatcttagcaaacaagcggctgaagagcatgaggaggcacttgtttacgtgaattatggcaggagtcagacatacacagggagggtgtctcagcatcgattgaaaatgaaagggctgttgagctgagaaagtgatatgcctggtggcaaagaagcaaggaccgaagtctggccttggttctactctcacccatcactgaaatgtggaaagacatcatgagaaagccccagcattctctcagctgcagttctgcacgtctgcaaacacacacagagacacacacgcgcacgcgcatacacatttttgccagtgcccaacaaagatcacataatctaagagaaaacaatgtagtccaaacagttccacctaacactccctgagcagctcctaaaatatgtcgagagcttcattaaggcacctgcgtccggaagaagatcacaatacacagctgggcaaaatgctgcctctgctttccaagcggatgctctgatttctcggtatgaggaagcgtgtgaatcacagagttaagttcctgataatccggggtctgcaagaagacctgggagaaaacaatccactttcttgaagctatgctagaaggtagttagtagacttccagtttctcagctgaagcccaacaagggccaaccccgagaagcccgtcctgagggtttcttccccttcctcgctgaaagccatccctctgtcaccctccttttcaatccagcacctgttgagctgaggaagagaggattctaattgtattaggcacttttccttagtagtcagatgttggtcccctctccccaaactccattttcagatgacccttgacaatggcctcggttgatcatgtttgtagttcagctccgggagaagtaaaagtagatttgaatctcatggaccaccttattgctacacccaagctcctttccttatagttcctatgccttcaagcttccttcctttgcaattaccaaccttcccttatcctgcgccaggacaacagatccaagcacgggacccttatagcatcttctctgtgcacctttgcctgcccacccagtctcacctgacacccgacacagctgccttaaacccttcaaaggaaagccttgcacttttcccaaagacagccgagccacattttattcctaggctccctcaggttccatggcttctaaaacccaggacatctaaatggctttatcagacactctccaactcatgacatgtctgcggctactctttcactcacccatcagaaagctgtacatttccttctactgaacaacagagtggggaaaagtgataaatgtgggatgctaggaaaataaagacacaaaggacaaagtacagagtgttagttgggaaggacatgcattcaggacttatttcctaagacctgaggggtaatgcccgtgcatacagattttattccaagtcatgtatgttacaagtctaaaaaaccagtagagaaccaggtcaatcttctcccttcactccctctttcctaagacttctacagtgctcctacatttactattgtccaaagcagggctgcaaaatacattcagttcaaagacttaatgcttcttagctcaatgttaagtccaaactctgagaatacactcatgacaaataagtagaggggtgtgatcataatttttaaaaattaaaggagaaattcacatgcacagttcccttgtacccaaattaggatcattttttcccttcacacatcagtcacatgaacttgggatccccaaatctcagtgatggcgctttgtctttccagtggggtctatataaacagtttcctttcactgtgtcagaatcctcagttggcaaataaaaacaaaattgcatgataccgcaatactgagaccaccttagagcttaagacgatttttaaggaagaaaaaaaaaatactggcacaaaatttaatagaataaattttaacacaaaaacagtttcagcccctccccactgaagtccatctttgtttcaaaagtagaacaaaaaggtcaatagtccgtgattttttagtgcacccccaaaccaaaggctttatcctacctccctcttttttgccctcccagacctaaagacaaaaggaaattaattgcctttcattagtttcaagactcctggtgcatcaatttcttttgctaataggtccataactcaagacacctttttttgtggatgactttttttttttttcataactggacgtgttagtctcttcctcccttaagccagattcttcaagcttctaagaaggcccttgtctcctgaaaatccactccagaatttcttgtcccacccaccccaccagtcctggctctccttcaacggcgcacaatagattatagctgcagctcacttagctcccacccctgaatgtaaaaaaaaatgagttctgaaaaattaaaaatagaataacaattaaaaaattaagagtccgaccgacatggctgttctctgaaatgtctcagcagagtttccccggcccctcagcgtccatcactcgtcggcgtcgggcttgacatccagcatggcatggagctcctcgggcgtgtaccccagcaggctttgcaggtcacacacaaaacggtacacgtagcgtttacccgctgtcttgtggatgatgtttttgtcataatagtagcgaaggccacggctcagtttctcataattcatcttaggcttgtttttcctttttccccatctcctggccacctgaaatttaatttttaaaaaagaagaggggtgaacacttccagaataagcccacgaaacatgttaatatgcctgcactcattggtgatgacccatgatgttcaaaagatggcgagagattcattgacaaagaagttacttttctgaattccaagttttgagggctagaccaggttggcagtgaagttgactctttaagctgatgaaaacgtagtgaccctgaacttctatggaattagagttaaaccatttgatattttaaaaagagtctgttttataggagacactacagagtctcctcttaccctgtattattaatagaacatctttgctttgaaagcatgaaatctgatgtgagggatgaaggactgagttacagtcacacctgtctttcatcaacaggaagcatctttttttttttttcaaggcacagggcttctcacttcagccggaacagagggcctctcgttcattgctctgcatcctctgaatttgggcgtgtcacagagcaaccactcactatttgtttgtttttgttttcttattgatgtataattgatttacaatgttgtgttagtttctggtgtattgcaaagtgattcacttctacatacatatattttcagatcttttccccttatagattatcacagaatattgactagagttccctgtgctagacagtaggtccttgctggttgtcaactctctgcgaccccatggactatatacatccatggaattctccaggccagaatactggagtgggtatcttttcccttctccaggggatctttgcaacccagggatcgaaccaaggtctcctgcattacaggcagattttttaccagctgagccacaagggaaggccaagaatactggagtggatagcctatcccttctccagcggatcttcacaatccagggattgaaccggggtctcctgcattgcaggtggattctttaccgactgagctatcagggaagcccacgggcaatgtgtacatgttcatctcagactcagtgtattcctcctcccctcactgtttgttgatgaaaaaacaaaatgatgagcaaatctcaccaaacgctgaaggcctctcaaattgtcagacgccttccatattcacagagccacaaggccaagaagggaacaaagtcagagaaggcaacttctgcttttgttgtttagttgctaagtcatttccaacactttttgcaaccccatggactgcagcccaccaggttctggtccatagaattttctaggcaagaatataggagtgggttgccctttccttctccaggggatcttcccaaccaagggactaaacctgagtatcctgcactggcaggtgggttctttaacactgagccaccagggaaacccaacttgtgtttacaaaaggcctaatatgtgacaggcactgtaggcacatcctatccgttaagctgaaaaacaaacgggcaacctaggtcttttctgtgttttccaaatgatgcagctcaggctcagaggaggtcccccaagtagcaggtggcagagctgggattcaaaccctagaaaacaccatcaagccccatacagcccatccccagagctctctctcaccgtccctggacacaacactctcaagtcactccctgcttacctcatctgggtcagaaagcttgaattcccagccatctcctgtccagctgatgaaagactgacaggacttatccgtgagtaattccagaagaaactgccacagctggatcggtccgctgcctggagacacaagccatggtgaatctctacaccagatgtgccacacgctcagcagcgaatcccggccccttccctcccagcccacccgccaggggaaaacaaggaatacccagagcacaagagttgcaggagctggtggaacagaccgaaacggtgaagaattcccaccaaaactgcctttaggctggagtatcaattgccttatttagatagatttaaaagtcagtccatcttttatggctaagtaaattctagaaagaaaatcctcgattgctcctttgagatattctaaggcaacatggtcagcttggccttcaaaaacaaagtcattatttctgccttatgaagtactcaaggtatgaaccgaggagtgtctttgtcagctccaagcagaagtcaaaagcccataagcaaagtctacggtaagggccctttggtccctggttttcgagggagaagaatattaccttagggcgatctaacaagggaagagaagttagatgttctcttggtcataatattcctctctaccacaatccagtcccccaagatgcctacaggcaagcatccaaactaagaaagggaggaaattaacttgccagctatgaaatcctcaaaggtcgggttagcactgtctcagaaattcaccacggtaaagcaaactctaattctcacacacacacacacacacacacacacacacacaattctcgtcttagtcatcaacactgccagcatcttagttctggaaggtctgacatactcttgattgttagtttatcttatactaaaagagtttgtgctacatagatttccttctaggatagttttctattcagaaatgacaatgatgccagagattcctatctgatttatgggtgtagctcgagagacagatatgggctcaatagtccacactgcttgttacacatctacactgtgtagacatgtaggccttgttaacaccatctcagaagcgatctggacacagtgcagctggagacagccagtccgtgcagacaagaaagcctggcatgctctgactcaagtaagaaaacttgagtttgttaggctctaatccttaacctgagttccaaatgtgtctgatcctaagtaaactgagatgcaataggaaacaagcttgtcttgcctctctatctaataaagaaatgcccttcatgatctaggagggcaatctcttgtcatgtcttggacacacctacaagacattttcatgttcaccattttgcttattcctaaaacccactccccaatctccggtatggcagactgggctgactgcctccattctatcattgcagagtaaggtgctcgggaaaaatgacgtcatgtcggtctaggcacagttagaaaacagcgggccaatccccagaccttgattccagggtaaccttgatggacgcctatgagcaaacagcggctggtgctcgtcatcactggtgggacaccccaaggaagccttggctatagtaatagcatcccaatggtccttcctcaggccagcccaagctcagcaaggaaaatgaaatacctctacctcacccttctatgcatgaaccccgagtagtttaaaaccatcttgcaagaaataccttacacatattctagaattaaataattcagctaatgcctgcaaagtatattaacatttgaagaaatagtccaaggaatgacactggtaaagccttatccacttctgtttctaccccgatggaaaaaaaaaaaaacaaaacattttctagacagctcagacacatttgcagtttccttggcagccaagtagtcaccagctaccaccctctgccagaaggaatggcctgtcgtgacttcctatgaggaatccattgagaagccatcaggatgggcaggaggaagaaaacagatttctattaagaaatgctatacaattagttacaatagcccttgtgacataataggtatcctgaagaagtgtagactagatacccactgaaccactgaaatgagacatgaaaggaaaaaccaactatcccaaaattatgaaaataagccagggagttcatggtcctctcttgggtcaagaccacagaccaaagacatggtggagagaggtctgctttcagacacctggtaaaggaaaacaggaacagaagctaggatttattgtgcacctactatgtaccatagtaatatgtcatgttttagagcatcttattgggttccctaaaatgttgatttgggtttttctgtaacatcccagggaaaaatccaaatgatctttttgaccaacccaatatttatccctcacaataactccctgagtagatactattgttatcacatttgtttctcccactgtacagcagagaaaactgacccactgtgtgtcttgtccaaggttgtgcaggtcagaagtggtatggctagaacccaggcagcctgcctgaccccctgaatctccatctcaagccatggagttgctcccaggcaagtccaacccagagctggcatctaacctgcccgctggctgcaatggtccttagggtaaaaggaccttgcatttgaaaaacagctcttcctcatggctcacagcaagcagttccggacaccagatggccagtggttccccaatctgaccactggggaccttggtgtcctcctcacaggtgacactttcagctccatctgcacccctcatggtcaccattaggccatgtgatttcattacttctcacccccactgtgtgtgtgtgtgtgtgtgtgtgtgtgtgtgtgtgtgtgtgtgtgtgtgtgtgtgtgtgtgtgtgtgtgtgtgtgtgtgtgtgtgtgtgtgtgtgtgtgtgtgtgtgtgtggggaagcctgctaggctcccctgtccatgagatttttcaggcaacaacactggagtgggttgccatttccttctccaggagatctttctggcccagggatcgaaccagtattctgcatctcctgcactgccaggcggattttcactgctgagccacggggtatgcccctctttcattccacttgtcttaaaggcccagggatcgaacccgagtattctgcatctcctgcactgccaggcggattttcactgctgagccacggggtatgcccctctttcattccacttgtcttaaagtccctttagggataagggctctaatcataccaggttgaggaaagagcaagaattatggggattcttttccctgggaagttgtggtcaatggcagggagaagcaagcacatccagattcccggggaggggggtccaacagccacctcaggcccccacccttcagatgtgcagccatagagtggggacggggcttggattagcatcacagggaccagctcacgagggagggacgtcaggcagaactattcctgctgcccctgctgccacttcagagccgcaccccactgtctgcgtacatcttatccctggggtctgtggatgtggccggagacagggtgagtccttgcacgtgggtgtttttttcccctccgtgtgagctgtcctttgttcataaggaacacaaaactgaaattcgggaactaggaacccaagtcctaggtgtggcgcctctttttttccctatttactgaagggaagagggagggtaaataggaaaaccagatgccaagagaaaggacagggcgcaggatggggaggcagggaggaatgtgtctgcagggctgcgcaagaacgaagtcatagcagcagtgatgtcagcgtgagtttccttcccttattcttcaggagagatcctgccagcccagccccaccaacggcatgcacggcgctcccacccggggcattctggaagccgctgctagcctttcagaaaacctgcaatgtgaccctgaataaaagggatccatgatgcttcccagaaattcctctcttgtacatttctgctgacaccccaaccctcttttaggttgtgcaggcatcagagataggacagacatgggcttcttttcccagctagacagtccggaatgtgggcgtcagggtggctggtgcccaggctggaccagtggagagtcccacgctggagcctatttccatgacaatgtacccatcctccccttgggtctgggagggaagatcgggacctctcagggtggcccactcccaaaggtggctttggggtcactggcaactctgacctgctggtagcacccaagtccagacccaagggaagttttcaagccccagactcgcccacatgctggctgaggctggcctgctcaatctgagttctcgcaggggctgtttctgcatcgctcggggtcactctgcccaaatctgcagggccagggctccgtccctgcccccctccctccgacgcatctttacgtggaaaagccttctcgccaccattccactcacacctcctctcggccctgggcccagcccctgccacccacccacccaaccggactctggtcccagtgacctttgtcccaggagtggagaatggtactaataatagtgccagtcatgggcaggggagctcacacaccgagtgtgactcacaatgctgtccctgtccaggggcccagggcagtcaacggcggccttcaccaggccgccccggggtgtcacacgtcaggaatccagtggcatcactgggaaactatgcttctcaagtcgaagctctgagctacgacaacagagggtccctgtttgaagggagtctctctcgcaggcggggcggggaggtggggggacgccccccctccgcggctgcagtggggaatttcctctgactgctttgttcttctcggcttctggggaagaggaaaattctcagtacaacactgacagccccaatctgaaaatggtgacaaggcctccggacagataacatcgggtgggtacctggagggaccccaggacagcaaagcaagtcgcaggaggatgcctccctccagggggacccctaaagcatgtcaaatccaaggctataatctctctttttttttttttaaggcaaaacttcaagcgaatttctactcattgagttgattacaccccttctctttgtctagggactagaaggtccccatctatctagatgagggtagttatttaaaagccctgctttttttcccctctgttattctaggctaagatgtgagctacttaggtaaaaggaaaggcacaggctaggacgggaggttagcaaggtgtttccgatgctccggatcataatccctctccatgtggccacgtgtgggtatcttttcttcccattttctagatgtgggggttgccagccatggcaatgatctcactgctcgtaaaccacggtcagagggggacttcagcttttctagttcagctgcacgttcttgctccgtcacctgtgcccagcgcaaggctaacacagaagagtcagaccccgggcagccggcgtctcgtctcgggcagcctcccgtcatactttgctctcagcagggccagccctgacaactggctctccctgcatctctctcatcactagaacacatgctccaggggcagggcccggtgtttctgctgctgtaacccaaagcttgggatggtgcctcaccaacaaacaccagctatcaaaaaacctgcttgctgttgaatgatccagctgtcagctccctgggagcctgggttgcatctgattgacccttacaggcatagtcagtgcctggcctgggacccagtcttggacaggtgagctctgtaaacatttactgaactgtcttactcaaacaatcctcctgtgcggaaaagtatcagggttttgaaaaggtgacccaaactgcttctctctattaaactatatttggggccaaacaatatgggggactcctaggctacatttcatcaacatgcaccccaaaataaaaacgaccacacctcaggtcctttggggattcatctgctactttgagaatctaatctctgtagctcgactctcaaagtcaaatcaaacacctcagtgtgggcaggacaccgcatttattttaacctatgaaactctcatggttggtcacccttgcagcagggtttacttggctccaacagcacacatctgacaggtggtcctaaaacagaggaacgggaccaagcggccccgccctctcacccaggtgtctctacccacagccaaacgatggtggcaaaaacagaacactcgaatccagaaatgacccatctgttcacaagtctatctttcttacaaactactgcaggatggcatcactgactcagtggacatgaggttgagcaaactccgggagatagtgaaggacagggcgcctggcgtgcggtagaccatgaggtcgcagagagctggacaggactgaatgactgaacacagcaactacaggagcggccacctctgggggcaggtgggcgaccccagaatctaaacgtcacccgcttcttatcaaccccattctaaattaccattcataaatgatcccaaagtccctctttctcctttcggttcttgtgacctgacgtttaatgagaaactgaacagaaagcatcctgacagtgtcttgacctctgggccaaactcaacatgaagctgcactgtcctctgcctaaggatgaaggagtcggtaccagggcaccaggaagattttcaaaagacgcaagagcggagactgcatggtactttggcttgtttttatacctgtaagagcctttccccatttcttctgagttatgtccctctgtttctcccaactcaacccaatctcatctcatctccaccacaatccacacacaatccattctgtaactggctgagatgccttggttcaacaaatcactctaaaccattatgttgtatacacttgttctctatcaatggctagtaactcaagggcagcaatctaggatctaagttcctataactcaacacataaccacaaacaacattctaacaggtgcttggaaaacatccctcgtgaatatcgtgaaagacaacaggttcatgcccttacattcacggatgctggaataaccagtatcgagcaatgaaaacaattaagaaaacaaaaccagcctttaatgtcaagtccacgtctctgaaacagtagaccaaaagaaaggaggaagagtttcaaaaaatttaaataaacaaatatgtcggacactgggcacactgactgagatgacagcagacagtatcctataaaatgaaaatatatacatgatggtgggaaatgcccaaaatagggagtcaagtgtccagagccttgaccccacttcttccctgattcattgagtgatctcatacagctcatttaacctctctgggctttagtttatccatctctaaaatgcaagcagttatcacagctccttcctgcttaagagctgaccacagtgtagaacagtttgggaatataaaacataacagtagaattaaacagaagaatttgacaacagaaaaaaatatttttaaaagcagacttttcagaagaaaaacaaggaaaaacaagatggaatagaaaaacaaaatagcaaaagcactaaataaaattcaattattcttccaagaattcaattggccttttatatggcaattttgaaagaggacaaagttagaagcaaaagcaaaatgattaacatatataaacgtaaaatgttttaaacactgtagatgagaagatagttaacgttttttcaagtgaaggataactctgaagttcctgctctaattcaaagtaggcaggcacagaaagagcagatgcaaactgctttgcaagtgaaagtatagccgacatttctggtttggggaaatcttggccacagacagacttagatcctctttcccccaatgtactttttttttttccctaatcatctatactccacagcaagcccactccacctaataaatacatagggctgagctacagttgagtccagcattccccacaaatgtctgtagtttggcccaagagacagatcccatcagtattaatcgaaggaagagcagaaagtcttgtccagagatcaatgtccaagaccgtcctggcagggagcctcgttgtagggccttagctcagccagactcccccatttggggcagacttaactgagactcacttgggtctgcctggggcctgagcacaagacagttacacacttgagtgtctggaggaaaggcccttgtttttgcttgcgctcctcacacctgcaagtgttcaaggacacacgtgtaggagtggctgcagggagaagagacggttcctctcttaaaggggcagcctgtcctcaaagacaggcaccttccctccaaacttaagaactctgtctaatcacgttcaccctgctactcagacacactcctggacagcaagctggcaaagcgcaagccaggaagtggctttcttcagagcttttcctcccaatgtcttctaggtaactgattgttttaagaagtcaccagaaatgagtgaggtctggatttgagggtatagagtgcaaactgatgctgaagctccaatactttggccacctgatgagagaagtagactctctggaaaagaccccaatgctgggaaagactgagggcaggaggagaagggggtgacagaggatgagatggttggatggcatcaccaactcaatgggcatgagcttaagcaaactccaggaaatggtgaaggacagggaaggtggcgtgctgcagtccatggggttgcaaagagtcagacatggctgggcgactgaacagtaacagtgcaaattgtgttcagaaataaaagatgctttagatagctaatacaaatatccaaaggatgtatgtataatcatggctgattcacactgctatatggcagaaatcaacactgtaaaaattagaaaaacaaaacttttttaaaagatgaaaaaaaatatatatatatatatatcctcagttcagttcagtttagtcgctcagttgtatccaaccccacaaattgcagcacgccaggcctccctgtccatcaccaactcccagagttcacccaaactgatgtccatcgagttggtgaagccatccagccatgcctacaggcaattagaaaaaaaaaaagaaaatgccttaagcatctaggtcataagaagaaagatggcttcactgattaggaccagaaaataagacttgagaattctgaagcctggacctttcctagtagattttccatgcaacctctggctttattttatcctaggagtaaagtctcccccttgtaccaaagctgagagaaatgactagttaacgtattcaaattcttggggtggtgaactatatcttaaaccatcattggagcacagaacttttcaagcctttagccaataaataatttctgagcacccctcagatgtaaagcgtggtagccagcctgggtggaataacagaagagagtattaagaactgcaaggaggcagcagaagaaaacatgtctgttccactgtaatgggataagctgaaaagggactacccacgcctttaaagaagaaaggaccgagaacccagcctggaggggccctcacgagaaattgcacccatcttggctctgaaggtcaacaccccctcagagcccagccttgagagcacctctctggcagagcaggtcccagcctctacaccgagtgcaaactttcacattcacccaccttaggacaactttcactctcattatcgctcaaggagaggtgagtcacagagcaaacaatgcagttgggtaagtcaatgtcaacaggaggcactgaaatccagaagccagtcacgggccaccaggagcgtcgggatcgtggtccagcgccctgctgtatgacccgccagacgccacactgatcagtcagggctgatggggccacggccacatgaggctccaccctctggccacagggagcacctgtgactccatccacaggtccctaccaagaacatgcttcctggggctgctgcggccagggacagggcatggaggccacatggggccactcctgccaggcggggagctcccccactgggcaactttgaccgaaattcccaggagcctggacatccccttccttggaactactgttcccttggagtttcttctcacaagtctctttccttcctgtctgccaccgggcctgaaaggtccccgccttcactgtgaaagcccgccaccttctctcgctctctgccactctgtacttcagaggtcaccccccagccccgggacatttcttacaagtccaatcatgtcttgacatctgctgctcatcagacccaaaccaacatgctactaatgttggctatttccccccaccagttgtctgacattgtgcaaaactgtgaaagtcctcttctttgttgtctgctgtgtgactccgggctagacctcttccctccctgggaaccttaattccctccttcataaagtgaggataacagatttttctccatgtggttgttggtgacagttttcaaaaatatgagcacatatgaaagaatctaacacacagtgaaagctcagcacacatgtgggttgagctgaaaagctgaagtgacctaggtggtagtggtgtgcgcatgctgggttgcgtctgcctctttgcgaccccatggactgtagcccaccaggttcctctgtccatggaattctccagacaagaatgaataatggagtgggttgccatttcctcctccaggatatcttcccaacccagggatcgaacccgcgcctcctgtattggctggcaggtatttcagaccgctgagctaccagggagactttatgaagtgacctaaactgaaattaagtatcagctgtgctccccaagacactaccaggaatgactggaattctctaagttaaacccatcaccctctgaccagaaggaatgtagaactgtactggaaaaacaaaagatctggagaataatatgaaacagtggtaacagttagcacccaaagagggtttcctatggacctagcactgtgctgagtgccttccataagctattcatgcaattcccaccacaatccaaggagacagaaactgctattgtgaccattttgcagatgagaatattaaggcacagtgaggtcagtttgcccacagccatgcagctctggtcagtggcaaaaccaggacacactttggctgcctggctccagagcccccactctcaaccctgatacagtgaagcctctgccacgtagcccaaggtcaaacagcctctcacctctcatgtgcttaagctgaacctaaacctgaaggcataagagtagcaggcggggtgattatcatctgtaagcatcacaagaaagtcactttagggagaagagcacagggagggatgcacagaggcccttgaacaacacaggtttgagcttcacagatccacttatacatggatttctttttaatataaacatattaaaaaaatcctttttatagatttgcagcaatttgaaaaaagaaaaaaaaaatcagacaaactgcgtagcctagaaataggaaaacattaagagaataaaaagggaggtcaggaatgcataaaatacatgtagatgtacataaaacacagaatatgtgtaagtggactgtttatgctagcaggtcaacagtaggctagtagctaagtttggggattatactcagatttctgactgcacaggggttggtgcccttcaccccgtgtgttcaagggtggactgtagcgtctgttgaatggaaggaatctccatgcgtctgctgaatggaatgagtctccatgctgaggacccactcactggtctgacagcacccaagctgggaaggcaaccgggaaaccaggagatgccaaggggcgcaatcaagggaccaactggaagagcccttggcagctgaggccacgggattttccaggccagctgctcacgaccaacaggacctgtgaggttgcctcagcaacacacgggctggattctgctcaggggaaacatcggcttcaaagacacaaaggtggcacttctaagaggagacagagtggcattccagcagggtcaccacccagttccaccacatggagttaagagtttgttaaagaaacagccacccagaaaatggaagaaccagagacgcctcgaaagcaggtagttggcaggggaaggggggtgctgtgtcccctaaaaagatgggtccccttgtgagtttcctgactcccaatccaggcacccacaggcttcaggtggtttaaacaccaggatctgctatctgttttgtacagcataaaggggtctctctgccctaaaggcagcttcctggagctactggagctgcgtccagtccccggggtggctcagccagctgtggtcttcaaaggcgactgacaaaaacagggaacctccctgtccacaccttcaaagccgtttagaaggaaaaagtgaacaacaaggccgagtcctcccactatgtgattttctccacgggtggcagatgtctaagaccaactgtccccatgcaaaccagtcaggaggcagaggcagtggaacctccacgcaggcaacaatactaagggggttctgacccctccagctcggagctgccggggacccccgcaccctgagctccaacatacttccccagcagtctcataactgagcagcagtcaactcactgctccagtgagatcccactcacattccatgcacgccctgaggacccaccgccaagcacagcgcagagaatcagaattccccagcttctgagatgctggctcgtagctaggctccacataggctgagggggtttgtctggcttcctgcaacccgtcactcacaggggcctctgaagaggaaagggcagatgctgtttctgcctctctcattgccaaactcttctcctcccagccatccaggcactacccacggacgctctaccctgagacagtgacgctccctgtaagcctgaggccaagtccagttttgcctgggctgaaaacctcaggactcttgtaaatggcaggactgcacaaaaagagcactagggttatatgcttatgtcagcaaagactgtagtcaactcacaaccttaaggccacagtattgacatggagagaccgtattccagaacctggcttagggaatattccctccacccccaattataaagctccaagttgttcctaataacatctccatgggcgtgtaggctagaattagaatctcctgcaccaattcacaccacagtcttcttctgctctggggaccccctctcctttcctcatcagtgactgaggctcacatgagaagcttcctctgaggacactgagatgattttgcaaatccagctttccttccgcaaaccgtgatttcaggtgatgccccccaagctcacatttcattctgaactgaagggcttggaagcccttccttttgcagaaacgttgtttatttccaaaacatgtcttagcagtactttcatgtttctgaaccttacaactcaatgaccagtcagaacgcccaggttttgggtgtggcccttggactctgttattgtgtgagggtagacgggctccaatttatctacaaaatgagaagaaagtttatctcaggcaaaaagcaatggatgctaaagcatctatttctgctttattgactgtgccaaagcctttgactgtgtggatcacaatcaactgtggaaaattcttcaagagatgggaatatctgaccacctgacctgcctcttgagaaatctatatgcaggttaggaagcaacagttagaactggacatggaacaacagactggttccaaataggaaaaggagtacatcaaggctgtatattgtcaccctgcttatttaacttctatggagagtacatcacgagaaacacagggctggaggaagcacaagctggaatcaagattgccagaagaaatatcaataacctcagatatgctgatgacaccacccttatggcagaaagtgaagaggaactcaagagcctcttgatgaaagtgaaaaagttggcttaaagctcaacattcagaaaacaaagatcatggcatctggtcccaccactttatgggaaatagatggggaaacagtggaaacagtgtcagactttattttggggggctccaaaatcactgcagatggtgactgcagccatgaaattaaaagatgcttactccttggaaggaaagttatgacaaacctagatagcatattgaaaggcagagacattactttgccaacaaaggtcaatctagtcaaggctgtggtttttccagtggtcatgtacggatgtgagagtttgactgtgaagaaagctgagcgccgaaggattgatgcttttgaactgtggtgttggagaagactcttgagagtcccttggactgcaaggagatccaactagtccattttaaaggagatcagtcctgggtgttcattggaaggactgatgctgaagctgaaactccaatactttggcaacctcatgcgaagagttgactcactggaaaagaccctgatgctgggagggattgggggcaggaggagaaggggacgacagaggatgagatggctggatggcaccaccgactcgatggatatgagtttgggtaaactccaggagttggtgatggacagggaggcctggcgtgctgcgattcatggggtcacaaagagtcggacacgactgagcgactgaactgactgaactgaaaagcaatggggattgtctagggcttccatttctacaaggctggtacccctttgtgcaatgtctcactcaaaaatacttgcaagttgaattcctgatggtctcaagtgtagtctctcagaggctgaaggatcagctattcataagtctacacagcatagtaaatcatagtttcattacaggtatgaatcgcttggagcttagccttttcccaggctccatgataaagaagagaccctgagcacttcatacaacaattgcaacacagagctggggccacacctacacactgacaacacaactattaccagcaggactgctccacaccaactgcaggagtgacaggaaagaattccttatctgtatcaactaaagtctggcaatctggagtgaagttctatgaaggtggtttagagaccatagctccaccccctcctgcataccacgccccctccccctgcatagtgttaatgagtgacaagcaaggcacaaggccctgaatgtactctaatgggagtaactaagataaccaatgagtgttctcattctttaagagagaaagatttcatattcaagtgagacatctggcacttaaggttcagttaagagccaccttcctgcagaaggcttggaataagtcatttttttgtgtctcagttttgtcattgataaaaggagcctgaagggacagagaagggaagggattaatactctttgaaaatccagcatattattctacacctactgaaatggagggaaaaaaaacagggatgcctatgtttgtcaaggatctagagagcattttgtttaggtccatcgaatacacagaaaacactgggccacttctctcgggtggttttgtaatcagatggggttcataacgtatcttcaaacagaagaaaatggagctttctgattgtatcagtttgataatcataagcagtcccagcaaggtaagaaggtgcattctggcggaagccagtgttgcatttgatgttgtctcaactcagctaacaggcaggctttcaagccatgttatctgcccccacatcttgacctaatttaacaagttgccacgggagcccgatgaaggttgatgcaattttcttatcttgggaggaagaatgcaactgtgcaagagaatgtgaaaattcagtttctaactgatttccacacttacagtgcggtaatcgagacagcatcagaagtcaaatgtattcctttgaggatgtaatggacagattactgggctcccagagacaggaaaatggattcacgtcccagttcagggaatctatacagacatcctttagttcaggtgacataaaaggtatacacgtgctcctactgtgtggccacacacaccctggaggtaagcaaatataaaggaaacagatttttttaaaaaaagagcatataacttgagatggaaaataggtatgatgtttatgagcaatgaagagttttgccaacacttatacaatgatttccactctccaaagtacttttccgaacttcaggtcatcttggcatgtctgcatagactcagagactcatttacaagaactccagtcactgcacacttcccaggtggtggaggggcctaaggaagcatgttccgttccctggccccctccctaggatgtatctgagatgatgaggggtcacaatgaggggcaagatatagttttcactgtggacaagagatatttaccagacagtgaacacggggcgggggtggggggcgcggaggtgggagaggctgggggttggggaagaaagccacccaaatttggaccactccccataccatggggtggcagggagtcggacatgtctgagcgactaacaccacatgccaaataaatcctgactttcatcaaaccacagcaataacaaaatccagttcaagtctaaggacaatgacaatatcttgaattcgtcaagatagtgaaccttccaggcctacgagcacttatctgtactcaacatgtactcagaaacatctgctgaaataattgatttgttacgattgagctttctctcctgcgtctagcaactcgtctggcactcatttgtctcattaactgagttagttcaattacatgctcacagatctcctaccaagagagggagggacacttccacttcgctaaaagtagaagagggtacaaggtaaatttgcctaaaatcacacagtgtgtgagggctggggggagcatggaggacttctgttttctgggctatcgtttgcacctctatctgagagggcttgaaaagtaaaatccccagttacaaagaagaaaaagctgaatggtaagatacttttaaaattgtattttagttcaaatgaccactggagtttttgagatcattaactggtaatcatctcctttgtcccattgaatgaatattctactcccttagagacagagacagagaaagagagaggaaacaagagcgaggaaaaaaaggatggaagggacgacggaggaagaagcaatcattaaaacaatccacccaaagaagtgtatgcatgctcagtcgtgtccaacgcctctgcaaccccgtggactgtagcccgccaggctcctctgtccatgggattctccaggcaagagtactggagtgggttgccatttccttctccaggggatcttcctgacccagggatcgaacccacatctcctcaatggcaggtgaattctttaccactgagccaccactggaaagcccaaataagggatgacatcaaacataactcagacttccaggacgttcctgtatttgtcctgaaaagagctttagatgttctgatctgtttggctttggatgagaaatgcccacctgtgagaaggctcacaggtggcatgttggtgttgcctctcctgatggctgtcttcatgtccaaattcatacccttaggtcttaacattccacttcatccttttccttctctccttgaaactatgacacttggagacatttccaactctcagatgactcttgttaagatcatcttagctgaaactcttcaaatcacttgtagagtatgagctctgcaggcttctcccatcggggactccaataacttatacacgtgcccttttcagaagagtttctatttgaggtagagatcaggctttcaccatttctagaaacttctaaattttttgtagagtagccacaattccttaccagaatcttaccccatgcaggttgacctaaatcataaggctttctctggccataacccaaactttagaacttaaaagtcactatacttaatgtgattatccacaaaaccaccttaactagcaaaattttcagaactgcacaccaaacgaaaagaaaatgatgaaaaccgttaaaggagaagaattatgatcatgcctgctgacagtggtcatggtagagactatgtcagagggaattaggcaagacctttgataaggagaagctacattaaggatttggtcctggaagtcagggtggcagggggaaggagaggtggtagcaaacacttgggcaaatgagagcacttgcatcacaagaagagaggcaaacacagccactcagagatgcctgccacctccacagcccaaattcacttcacagctacctctgcctctccccctcctaactatgcaatcttttcctcctcctccatcagtgtacccaactggagtccagttctcaaaatacctaagtgttactataaggggttttccaggtgtcgcaggggtaaagaacccacctgccaatgcaggagatgcgaaagatgcaggttcgatccctgggtcgggaagatcccctggagaaggaaatgatggcccactccagtattcttggctggaaaatcccatgggcagaggcgcttggcaggctacaagtccatggggtcgcaaagagtcggacacaactgagtacacacagcactctcatacatcctgaaatacactttacatactttccgtattccaaatggcattaatagaaaggcacaaactttctactgtctgctgcccagagggaagggactgacccccttgcacaatagccatttcccacctactcgtgatgctcaagcaaggacttggggaatattgtagaaagaaaaaagtaggtgactattaagctcctttctggcccatgactctgtatatagttctggttactacttcaaaatccaaacatgcctgctgagcacctatgcatgcactgaactgcacaaggagctggaggaatgcaacgtaagggacacaaccctgatccatgaaggaggaggaacttttccaagcatgtgagttgttctcaaaggtcagctgagtttccttgagttttccctcacacaaaaacagggatagagctcttaagatcagatagacacctctctagaaatgcagattgaggtgtctgtcttcatccacacaaagggtcttcacatggtgccccgcccagggtggataaattgcaagaggccaagaccaccgctgcgcattcgaagcttaaaacaagctccactcacaacacaatttctgaatttcagaaaacactacgatcttacaggcttccctggtggctctgccgtaaagaatctgcctgtaatgcgggagctgcaggagatgtgggtttgatccctgggtcaggaagagcccctgaaggagggcacagcaacccactcctgtattcttgcctggagaatcccatggacagaggggccaggtgggctacagtccatgggttgcaaagtgctggactgaagagattgagcaggcacaatcttacagaaaagatctgatcattaatatattcccattcctcgcgtagatctcagatacacccttcaaaccttcccaaggttacacagcctctgtgccccacctcacttggacaatgaattcagattcttggaccagattctcaatcaaagcccaagctctcaacatacaccttcctttctcttttgttcaacatgactacaactttcactcctgggggaaaggcaataataaagttcagtgagaagaaaggtgtcctctagaggccaggatctagcctgagtgtagggtgcctgagggcacttttcccatttccactcctgcctgataatgaggattctactgccaatgagtccagggagtagacccattcagtgatggctttcagcaacgctgctgctggttctgtgttcaaagagccctccaagagcaggtaagaagcagccccttgatgctaggctgggaaggcagaatttccagaagtaccggctcgacagaattcccttccccctagttacagattcaaaatatcagttttcctaccactcttggaaagaaacccttgaaacagaatgatacgatttgcttccaaaacccaatgactatctgcagagtggcctgagaggctaacccaacctctcagagtctacttgtcccctagaaagggggtaaccttaggggctggggacagcacagaagtgtccagggagcccaccccagagggtggaaggaggccaggcgtcctacctgtgtagcctgccagggccgcagcaggaatgacgggcttgtctttattgaggtcagcgcggtcacgcacatagtccttgaaggtgcccttgggcttgtggttggacaaggcggctggatagtcctcggagtcgaagctgtcgtaggaggggacgcgctgcaggctgttgaaagacgactggctgctccaggactgggtgaggcggtcacagctgtcgtagctctctatgctctcgaaggagtcctggcccccgagcttacctggaggtggaggaggaggaggaagcgggaggagggcggggaggagggatgggaagagacactgtgaaaccctctctgtgaggatgtgcagaagggatacagagagggagcggccggcggggatggaggtgcgtgcatttgctccggggaagaggggctgcctggacccagcctgagagcccccgcatggtccggtcttgctccagagcccctagggccaggactcagagccgggtgttgctactcatctctgccagggggagacagcagtgtctggaacaacgagaattccacaaccagaaacctacaggctgagaacacgtctgttatgacgagatttctggccgatgagttagacccaatgagtggatgaagaaatctgagctgcatcaggctcaactcaccctctaccctaactcaagccagggagatgatttcaaaaggccccatttggcaaaatattttggtcataagaaaaaaaaattccattacactaggagagaattgaccttccttgaccttggaactaaaacactattttttagccttttttccaaacactctttgaaatgtacatcgtaccgcctctatgccttctcaaatagaaaaagaagtcacgagatgttttttttgccaggaggttaaaaaagaaaacattatcaatcttctaaatagaaatccatattctttaccgagcactatctgtacttgaaatttgtgctttattagggaaacgaaggcacttaaaaagaaaaaaaaaaaaaacaaagaagttgattaaagagttaaggtccgtagcaatggcagaaatcctttactctgtgagttgcttaaggcattcttaactgaccacaagatcatgcaagttcattaattttccaaaccaggttataaacagctgctatgattgcataatagctcctagagaaatttccattggcaaaaaatgccatttaaaaggaggctgaaaacggggggtgggggaggggacaaaaacaaatgcagctaactgctgaaaaggctcacaggaatatttcttatgttttatttccagatactttccaggcaacctcaattaaatcatgggagattaaatggctgattgagtccagcaaagtcaagaggccaaaggatgtgacaaatgtgcatgcagaaatacctgtgagtcaaggctggctggcctactctgacgtttaaaccccagaagaaagttggtatatacaaagtactgctagtaagtttctgatgtatcctcctcttcacaacagagaaaatttgttaagacaatgaagttcaaatatttaattttggtgtccaaaccaaaattaaatatacagtaattaggaaggaagatatatcgcttccaaaaaagatttttaaccccagataaaagaagttaaatatgtaatttttgcattatctactcttgtaaatttcctgagcctcttatcccttccaacactgcttggaacaaaaatacagttagttatctgcttcgtctcattccttcttccaaccactcattcaaagaacggcaatccccagaaagccttggagctgttggccccatctgccaagtccacggtcacatttgcaactttttattattatcattattatcatctagttaatactctgtaacgacctacatgggaaaagaataagagtggatatatgtatatataaactgattctctttgctgtacacctgaaactcacacaacattatgaaacactatactccccaaaaatgttgtaaataaaaaaactttaaaaagaagggactgtcccttccagaaattcacattaaaagtctcaagaaaacagaacgcaaccaagaacgcagcagcctcttttcaacagaacaggaaattttgtggcctcccataaaaaggtgtttgctcattccagctgtccatcttaaacataccaaaagcctaagaaagagtttatattttcatgaggaacaccccaccaagtcccttgcatttacactcagaagtccctgagatgattccgtcagtcatttttatactgggagggcgtggagactagaatttccactcactggacagctgaggttccaaggaaccccagtaagcagggacactgaacgaggctataaccgccccctggcagcctctcaaacataagccaaatgcaactctgttgagagctgcggtttatagcaggaggctgctttcatttcagctctctttcacaatcctagagctgggaaccttcatttacgggtatttttctcccaaaatgggttggttccaactagatgagtcgctcagttaggctactgtgttcagggacggggaagctcgtgtcctctaagacatccatccatcggctggctttcctgaggaatatcttggcgaggtccttgcaaagctccctgaccccaccacacagacctcggggcacccaaagcaagaggtgggggagccccgtggcagcccactcaacagaccagcacaaagaagacagctctctgagtccaaggaagtggaatagaaacactctgtctaccctaatgcagtctgggaacactgcgattattgttcatcatcttcaactaacagtgatgctttcagtctaccccaaccctgccacggcagagtcaatcaccccgctggaatacgtcctgtttgcagcacttctcactcgtaaaaaagcaaccgtgaacaaaacggtctgcccccaagtttgtgtggtgagatgcttggtgtgagcaaaggagaacgaggccagagagcaagccttcctgtttctctgtgcagttcaccgtctggcccaccatcattcttctggggtcgcaggaaccaagaggagagggaagaggccagttacacagagcaaagccagacgcaagtggaaaacaaacggcaacagtcctgcccaaagtgacagcacactgggccctcctaccacacacgcatgcgcatgcacatggacagcctcactgcacactcacagaaaaccccgtgagaaagacaggcattctgttgctatgacccacctgagaaaaaagctacacatgtaagtatttaaatagacctgcatccaaaaataaagaaggggaaggtaaagctggtcccacccatccccttctgtctgaaacacaaacaccccgtggccctaaggagggcagattacaggctcagattctgctgggactttccctccgcaggcctgctgggaggaagtgggagcctggacactcgaaggagctgacagtgtgagggccatgaggccgtggcctcaggacagggagcagggtcagcactgagcagacatcactgcgaggccggctacttggaaagacttcctcctgctcatttcctgtctgtaactctttccagtttatccatcacaagagtcaagctagttctcctgttgagtgatctctagcatcatttcaagtatttggcagaaaagtagattataggactggcaggaacctgggtaagcttctgtatatttgaattagaaaatctcaggacacttaaacttaataataataataatgtgtcacctaacatttctgggcttctgttcccttttctctgaaacctaatttactctcattttaggaagagttctataatatctgaaatcatgtcttatttctgtttcattttgcataaaaggtaacatccagaatattaaaaaaaaaaaaatcagctagttcttctcccatgagcaagtctgtctttatacaggactgtccttctatcagagcaaacagtctggacaggtcactagatgggttgtgtctctgagtgtttaggtcctgatctttaaagttgagggtatttaaccttttttggctttgtaaggtcagtcagctctgttcagaaccatgcagttcactgtcagtgaatatgttacctttgtcctaagagtcaaggcagtgtgagagagtatctagttttggaagcttctggccacctctttccctggtcctctagctaaatacacacttagaccacactgctgatgactggttccaaataagctgttggttaaccatcttctatcttcccaaaccaaagaagtcacaggagcttgggaagcctaggctgagaagcagaggtcatcagacaccaagccaggaggggcagtccgactcgggaatactcaaacaccaggacgacgtagagatcaattctctccgggagggttctcagaatcatttttatgtgactgtgccctccttaagcaaaatcctctcaaggaaaataaagcacgcatgcacctaaattatctggtgaaatatcgtacctaactaagaaatgcgactggtcttcctgccggatttcaattccaccgtgaattcacagtctcagtcatcatgaaagcctcggctaagacttcatgatacaaaattcttaacagctagacattttaagacggaaaagcaaaaactcaggaatgcccgtggctaagagtgagaaggaaaaaaaaaaaaaaggaacccaggaaacgcaccaagcaaggcaattcttagaaacttctagagcagaaatgtgacctaccacgactggccctccccatgcacatgttatctggggtcaccacttcttgtttgatggcaaagtagtctgtctgcaaggcgtccgtctgcagagggtcccggaggatgaccgaggggtagtcgttctcatatttgagggagaggagctcctccgagctgatgggatggagagtctggtaggactctgtgatgaagctgggctcggagaactccgagggaggaacgcactgggcgtgctcaataccatagcctggaaacagagtgtgtgattggagagaggagaggtgagtaccgaaaacaggctattccctccccatttacaacggccccatgacgttaaccaagctaactacctcagggaataaaagacaaatacttgaagtcaaaagggcctgggttttcaatcttgctccactacttaagggccatggcccttgacaggcacttcccttttctgactgaattctctcatctctaaaatagggatgatggcaatcttccccagggcattgtgacgaagatccaaggacagcacacaaccaacctttctagcacacaataaactcactgttgttgtgagtatacagatcataataaagtaaaacgataaagggaaaacaaacctacttaagataccctttgaaagcaaagccatcagataagcacagccctacactaattctcttcctccggccattcctgcaacctggtgagggatcaggcaccaggaggacaaggctttctgctcagacagaacccgaagctgcagggcatgccctgaaggaaagatttcaaagggaatgctgttgcacgtactagcaaaaaggaaagaacaagatcaaaatccctgacctgaacctctgttggccaccacatggcccagggtcaaacaggaccactggagggaagcaaatagcagtttctctgtgacaatctgtcacgctgaggatatcagcaagaccccagtgtagaagcacgcaggtgaataaaacgtgcaagaggttgaaaccttgtgctttgcaggaataacaaagcaaataagcaagtgtctacatgttttctaaggttttttttttaaaaaaatatgggccatttctcaagactttattgaatttgttacaatatttcttctgctttatgttttggttttctggccacgaggcacatggcatcttagcttcccaaccggggatcaaacctgcaccccctgcattggatggtgatgaagtcttaacctttgggccaccagggaagtccccaagagtctacatgtccgaagctattattttctgtagaactgccaggcaggagcctgagatggcctaggacagggttcctttccgaagttcccatcacagtgagcaggaagagagaagaggagccaaaaggaacttactaatgaagtaatccgaggtatagcgggactctgggtagggagggttgactccattaacttggtatggcttcacatcctctgcaacagaccaggaagggagggaacaaagaggtcagcatgtgagcagtgctcagcagaagaggaccctggaggcgaggaccacagtgatctcagtcccgctgagagaaaatctgcatgttccctaactgagctagtgtctgagcctcccctgactggacccttgtctacggatgagctcaccaaagtatggctaagtttatgatttcagtagctggaaaaggggatttaatatcttggaaagcatgcccatgagtaatctcgaagggctgggaaggcatccaccctctttctgatgcatgcgtgtgccgccagcctccagggcttgaagacatcttgttgttgttgtttagttgctcagtcgtgtcggactctttgcgaccccatggactggagccagtcaagctcttctgtccatgggatttcccaggcaagaataatggagtgggttgccatttctttctccagtggatcttcctgacaccttgggagtttaccaaaatcagtcgccaacattcaaacagatcaggtccagagtttttcagaaacacaggacaatctttttaggcaggaagatttttattattttcttattattcttactgctatttatttctagccatgctgtaccgcacgggggatctcagttccctaaccagggattgaacccctgccccctgcaccagaagtgtggagtcccaactattgaaccaccagggaagtgcaagcaggtagacttcagagcctccacttcttccagcagatatctggtgtttggtgttttttccattgccctcagatttcaagttcaggcccaggtaagacactagtaaggtgattctacttggtgaaatatgacagaagagccacataaccaaagttctgtcctggtgccaagctctataggaatgagagtagaacgcagatgaaggtaaccaagcagagaaacttctcccctgaaccaaagtgaacttgtagatcccctaatgaccttggaatctgatggtagcccctgactactgtatgcaacagtcggattacatttcactgtaagaatcagacatagacagagggggctggtttgggtttttcctcaggtatttgatagcttgttgggagcagagactgctgggaaaacaagttcatgcctgcaaagaaaaacagttcccagctgagataaaatgattaaactctgcttcagcagcttatcagattgaaacatcccctgtacctttggcctgccaccccacccagaacagctatgtttttttcagcactgggttgccttactttaatcacagaacaaaagctgtagcctcaatacaaacatcacactcagctcttggaggatctgaagaagcacagtcctccgtctcccttgaaaatgggtgagatgttctcaagctcactccattactcctcattctcctaaattcattggtatgattcctctgcaggaaggtaaacagccgattcactggaaaagaccctgatgctgggagagattgaaggcagaaggaggagatgacagaggatgagacagttggatggtttcaccgattcaaaatggacatgaacttgggcaagctctgggagatggtgaggggcagggagacctggcatgctgcagtccatggggtcacaaagagtcggacgtgacttggtggctgaataacaacaaagccagaagctccccgccatgagtccatatcactacacaaagaacataggacgggaagtttggctggaaagaccccactgtaaggaaacaagtgatggtgaggaaccacctgacctgtccttgttttacagacaaggactcactctaagaggacatgcccttcctgtgtcccacggttgctttgagaatccaaacagactggttcacagtgcaaacttttctgtctattcatcccattcattaatttttgagagtttgatattgaaactccaactaaaaatcttaacttatctacttaaaaaataattatgtagtggagctatatgtacctttgttctatattttccaaaactcctgtaaatgtgttatcataatttcataacttaaaaaaaggaaaacttatttccaagcccttgggaaacaaggaaatgctatatagatgagttgtaaccgatcagagccgactgacactgtagaccatctggctgcctggggtgctgacgagagggatgcagggctttggcagcatgtatctgggtgacacggtctgatagagtccactgccgtgtttataagccaatgcttgcatcagacctgctctgagcctgccgtatcctttccctctataaacaggcgctcacgtcaacacgttatgagtggtttgtgtgcagttataccgagatcacggcgtggcttcggggaagccggtaccgccacccagcagtcctgggccagattcacctacttctcaattctgcttatttatttatttttcagctatagctgaggagaaagggggagagaaaaaaaaaaagtaacacttctgtgcccagaggagtctaatttgggtctctcctgggcattgcagaatggaaaatatccttaaacaaaggaaggtattatatggaataaaaaagtgctaagcctgagctctgctccctgcctcccgcgtctgcaccaggggttggagctggtgaccacagggaaagggtgggcctgggtcagagagggcaacgggcttctaggcttacagtcagctggagggcactgctgactgctggtaactgcaatttattttaagaagaaattcagaaaaataagcgcaaaaacacccaagtttgccgcctgctgctgtttctatactcagcccggactgtggtgcatgagtcactcgatccaaaaaggttggaagaggctggtaggagaggccatgtcattacaaggttgcaacacgacgtcccgacataaccccagcttctgcttcagatggaaaaggtgtacctcgcgactgcaattccagtcccgttagtgggcagagaagactgcttattaagaagctctgaaacactgagcttggatgtggccatgggtcaagggggtgtgtttcacgattgccaaaaaaaaaagaaagaaagaaaagaaagaaatactcttttgctagttgtgggcactgcttgttcaagcagtatatgagtttaagatagggactgagattagaactttgcaaaccaagaagctttaggaggtaaagatgaaaagtggagctatacatatatacactaacatatgtaaatagatagccaatgggaatttgctataggattctgggaactcaaactgggtttctggaataatctagaggggtgggaatgggcaggaggtgggagggagacacaagagggaggggacatgtgtacacccagggttaattcatgttgatatgtgacaaaaatcaaaccaatattgtaaaccaagaatcaaccaattaaaaataaacaaacattttttaaaaaggtggagtatccagtacatagaagaaaaagaaactaatgcttatggagcacccgctccctaccgggcaccatacggcacgtctctgcagatcgtatgtgctgtggctggacacccagatgacgacctcgatgcggcatcccgctccccagtcgactctggaagctgccccgtgcaggccccacctccctcaccccaccccgtcctcaggcatttacctttctgcaggatctccaggtgttcccacaagatgtccccaacgaagtctggggccagctcgagaaagcagtctttccccagtgcgcagagggctgccccgttcatacagaacttctggaagtccacacccttcaggctgaactcattgacagcccacatcacccagtcccgaacgtgggtctctgtccactgccgggggtctgcagggagagatcagatgatgtcccagcagatcagggtctcaactcttccctgagccttggagactacacaaaagtacctgaccttcgctgacacattctcagattcacggaatgaggaaggcctaatggagtatcttccataaccctcctccctgcatccaggtcagccccatcttctccctcccaccagttagctgatcactgccatcagccaaaaagtaacaaagagtattctccacccatggaaccttccaacaggttccaagagtctcctctctcactgccttaattccatcagactttattaaagcctgggaccagggaacaaatgactcctttaacggcaataatgacaaagtcaagtgagctctggacgttgcactcacctctccctgcacttactcatgtaatttacttgcggccattatgcttaattattcttatcttagtaatgatggttagtatagttgtccttgcatatccaatgtgattggtttcaggactcccccagataccaaaatctggggagatgcatgttcccttatatacacaaaagggtggggcacactcagacctctgtgtatgtgggttctcacatccccagattcagccaacagaatcggatctgtggttgtctgaatctgccaatatggaacccttggatgaggagggccaactatagtaatcacagcaatcaggagcagtacgccattcaagtaatacttagtagtaacattattgtgtgtgtgttagtctgactgctcagtcgtgtccagctgtttgctatcccatggactatagcccaccagggtcctctgcccatgggatttcccaggcaagaatactggagtgggtagccatttccttctccaagggatcttctcaatccagggactgaacccgggtctcttgcattgcaggcagattctttaccactgggccaccagggaagcccaacaatggtattaggtacctgtattataccagacaacctgcaaaataaatacataagacaggccctgcattgaggagccatgcagaacagacgctacataaccttcatgtgcgggcctggtttaacatgactacaccagctcacggcactgaccgagctcaggtgatggcagggtgtggtgcctacagcccacctcctacctcctctcaggtcatccccttcagtctagaagatgactttataagatgatggaaaagtggatggtcagaacccactttattctgctttatgactgggctctgctgtcagcagacgtttgtggaaaagcagagtatatgaaaaggtagccagattcattcatagaatctccctgaggcctgcgtctggcagggtggcagccgctcgctcccgcagcagtagcattggctgggtgcaaaggcagcctctatttttcttactcaatagaaacgtgttccttctgctctcagttgctcgggaaatgccgcttggtcaaggcttaagtcttccccagtcatttttcctttctgaccactcaagtcacttccctttacattcccgaataccctttcagaggagaatgcgtgtgtgctaagtcgcttcagttgtgtctgactctttgcagactgactctgcagaccagagcccgccgggcttctctgtccatgggattctccaagagaagaatactggagtgggttgccatgccctcctccgacccagggatgtctcctgcattggcaagcacgttctctaccactagcagcacctggaatgccctcagaggagaatacccaagtataaacacatttcaccaaaggacgtggaagagtaaatcccagaactgtagctcatggagttcatctaacggcagcccagaatgacttccaaacttgtctgtacaacagagtcacttgagctttacaattactgatgctacaggcaattgtgacttaattggtctgggatctggcctggactgtggaattttctgacgatccactgtttaatgtttgaacaagtttgggcaccactgccctaagaccaagatggcagggacaagcctggaagatgagggagcatcagcatgtgtctacacttgttccaacagacgtctgtcccaatctgtggctgctgattgagggtggtgagtaagtctatctccaccaacaggtgaggaaaccaactatatctcaaagtctggtccatcctctctccttccaactacaaaacctaccttttggaattcccagacgttgctgctctttagagaaaccactgaaagtagctttcaaggcttgagacatcatttctttgctgctaggagttaagagcgggacatctgcacattccatatctgcaaggcaaaaaatatcatatgaatacaaacaaaaatgaaaaaggtgatggatgtcagctagactgatggtggtgatcgttctgcaatatacacaaatatcaaatcattatgctgtgcacctgaaagtaataaatacacgtcagttatacctcaattttaaaaatgaaactaaataggtaattaaccacccataaaatataatagagcatgaatgggctgaaggaggcaagctgagaaataactgtagtagcatcatcaccagggcaggtaaaatttggggggctttccatagtgtggtagggtctgtaaaaaaaaaaaaaattcccgactcttgccttgaatgtctgtatctctgacaaaatatgtcaattctttctgaatagctctaccagttccccatagcctctattcatccttcacattcactgagaatattagtgtttctgcacacttgctgttacctctgaaaaggaaataacagcattcattcaataagtaattatttagcccttgctacatgcaagagattagagaaagaaccatgaacaagacagaaatgattcccaccctgatggagctgggtatcaggttccagaagggaaatcagttagtaaaaatctatttgcacaattaaacttcaaatacaacgtcaacaagggcttcacaggagtaggaaatgaagtgttaacctataatagagggtcctataggtctggagcaatcagcaaaagcctccttcagaagacagatgtttgacctgagatctgaaggacagaggatacaggagtttaaggaaattactccagaccagtggttctcaacgtgtggtccccagaccagccatatcagcatcaccggggaattcagccccacccagacctcctgaattaccacctctgagggggtggagcccagaaatccattttcaacacagaatccaggtaacccttatgagcactgatattagaggactgatatcctaagtgaagggaccagcatagctgaagattctgagacgggcaaagaggagaacctcggttgctttagtatcaaaacggtcggtgcagctgtggcgcagtgactgggggacagcagctcgagaggaggctgaaaaggtaaggaaggagggtgtgcaggaatttataacagtatcctaagtaagacagaaaggtactgagggttgcatgcagaggaatgatgattatattttgtctgaagaagatcaccttgcagtaattgttctttttttttttttttcccctgtctcactatacagcacgtgggatcttagtttcccaaccagggactgaacctgctccccatgcactggaagtacggagtctttatcactggaccaccagggaactccctatggtaattctagttttcatttttcaaggagctggcatcctgttttcctcacagtggctgttatgattttaccccaccacagtgcacatcgggcttcccaggtggtcaggtgggcggtaaagaagccacctaccagtgcaggagacgcaagagttacaggttcaatccctgggtttggaagactccctggaggaggaaatgacaacccattccagtattcttgcctggagaattccatgcacaaaggagcctggcaggctacagtccacggggtcacagagagtcagacacgactgagcgactaagcaacaatccagcgcacaacagttccacctcctgccagccctcagcagccagtgtacacacctagtggtatcacacagtagctgtgatgtgcgtctccttaatgactagtggtgttgagcatctttccatccgcttactggccatttgtgtatcttctttggagaaatgtctattcaaacattttgatcatttttaatggagttatttgcctttttttgtcgagttttaggcgttctctatatccctcgtaactcagtcagtaaagaatctgcctgcagtgaaggagactcaagttcgattcctgggtgaggaagatcccctggagatggaaatggcaacccactccagtatttttgtctagagaatcccatggacagaggaggttgcaggagtcagacacaactcagcgactaaaccaccatatacctagaaaaggtgacagcagagtcttgaagagatatttgtatacctatgttcatagcagcattattcacaagaactaaaatgtggaggcagtcagctgtccatcaacagatgaaaggataagcaaaatgcaccaacagtgtatacatatgatgcaatatgattccaccttagaaaggaaggaaattctaacacacattgcaacatggatgagacttcccattatggtaaatgaaataagtcagtcatgaaaaagacagattatatgaggtacaaatttatcaagtcagcaagtagactgattgatagctgccagggcctggaaggaggagggaatggggtggagggtggggagagttgtgtcttgggaacagagtttcagttctatggatgaaaacagttctggaggtggatggtggtgatggcaacattaagtcagttagttaagtcgcttggtcagtcgtgtccgactctttgcgaccccatggaatgtagcccaccaggctcctccatccatgggattctccaggcaagaatactagttgccatttccttctccaggggatcctgacccagggatcgaatccaggtctcccgcattgcaggcagacgctttaacctctgagccaccagggatggcaacatggatgtatttaattccacaaaactagaatttgggcttccctgatgacgctagtggtaaagaacccagctgccaatgcaagagacgtaacagacatgggtttgatcccttggtcagaagatcccctggaagagggcctgcaacccactttagccttctcgcctggagaatgccatggtcagaggagcctggcgggctccagtccgtggggtatcaaagaatcagacacaaatgaagtgacttagcatgcacccacaaactgtaacttaaaaatggttgagttggtttaagttttatgttatattcatttttaccacaattttttaaaacgggggaaaaaaactcgtttttagccgccccatatggtttaggaggtatttctgaatgggtgaaggaagacttgttaaaaaaagctcttgcattagttgtggtgagagatgatggtggctttgcctaggaaggtggctctgcagaaaaattcaagtgggcagatgtgaggtgcagagaggagacaatagcgataaacctgatttatgcaggtggtgcagaagagtgagatgccaacatctgtagagtcacaaaggggtcctctgccactgttgcgtgtacctccatctctgccgtatccaatccctcttgtacttgcagaccatgttcaaagccaagacatgtagctatggttcaagttaaaagtcctccaaatccacctcaggcacaatttccaacaaaaagtgaaaaagaaatgacttgagaattcctacgagctgtcctgtgaccttcagacctcaatgcacttcactgcagtcatttccagaagccctcctacttccccaagtttcatgtgaaacagacataaaatggctgagttccaggcagggccactgagaagttcctccaccagccatctctaaaacctgtctggttaaaaagttcccaatgggctaagtcacttcagccgtgtctttgcgaccccatggactgtagcccaccaagctcctctgtccatgggattctccaggcaagaatactggaggggttgccatgccctcctccaggggatcctccccatccagggatcgaacctgtgactcttaggtctcctgcactggcaagcaagttctttgccactagagccacctgggaagtccaaaagttccctgaatatacacaatgtgttattggctggataaatggaaacataaaggaggcacaaaaaaatgacaacggatgacctctgaaaaaagaagcaagtctactgctcctgaatgtcaaaatgaatggaaattgtgaggtgagaaaaaagggcaggcagcactttcccatagtttgctctgagccaggctgtcaggaaaccgcccagcgtcagccctcttgccctggaagaacgggagggttcacagccgtggttctcccaggccctgcaccaagggggatctgaagttccaaggagtagagagtttgggttgctttgggccatgcccaaaaaaacctagtggaaaaatcaacatgcctccaggaagactgacaaaatgatggaaaatcccagattgttacagggggaaaagtggggggaggggataaaatgttgattacataacatccagccctttgaacaatggagtaatcatcaaatgagtcactaagaaagacattagtgcctcccccagtccctactctcctcaccccagaacagctatgggacaggccaggaagtctcccctcaagagtggaagtcagtttgattcagagaaaaggactctttatttaaccaagagtatggcttctgaccaaaacacaggagtcaatcaacaaagactggatgaattcagtgtcttccgaatatgaatcgagtctccttgccttcgcccccatccaacacgaattcatgaacttgaactgtgtgggttctgttgtgtgtgtctgttcatgccactcaatttataacgcgatgaaaaggattctacggatggcagaaactggccaggacagcacatgtggaagatgagagccaagccaaatggatgggcagtgatgattctgtgaactgcaactgaaggatgagactggtgagaaggccccaagcaacttctaaacaggaaacctgggcagtcagatgccagtatgatgtgcacgcctctaggctgacaacaccccacacaggtttctgcttcctgtctgggagctggcacttctggattctggcttaattctctccaagggaagcagctggacttacttgtgcctgcccacctcaatgccatcttcaaaagcctgatctacatgccatcagctgcagctgcatggcactcaagggctgcgcccctgggtggagattcaaagtgctagatctcttgaaaaggtgctcacagcccaggtggggaaagtcaaccccacacattcgggacatctgcacttgatgagcttggaggaaggtgcatcactgtccatgggcccaaaggactcaagacaggaatgtcagaacttcttagaagtgtagaatttggggttaagaaaaaaatctaaactcctctgtaagggaatggacaatcaggcaggattgcacttttcagtagcacaggggttccatttaaatgatgatgaataatcacattcaaaagtggatattaatataaaatattaaactcttatcatgtagaatatgaatgcaaaaaagtcctctatgttgctcatttatgtctgtgccagttctgtcaatgataatcatcaacaataaagaaatcattacaggtggagaaggtgacatggtttagcccaagcaggcacctttgttatgcttaccatactttgtctcattacctattacaatacatttgcattaggcaccaaaaatatttctaatgtttgcaatagcacccagaaagtagtcgaggctccacagaagttaactaaatgcattttatggacaagtactaaaattgcctctgtgctgataattgtaattgtggtggttattgtttagtcactcactaagttgtgtttgactgtttgcgacctcatggcctttaggccgccaggctcctctgtccgtgggatttcccaggcaagaatactggaccgggctgacatttccttctccgggggatcttcctaacccaaggatcaaactcctgtcccttgaattggcaggcggactctttaccattaagtcaccagggaagcccaataactgcaatgtgtgttagttgcttagttgtgtccaactctttgcaaccccatgggctacagcctgccaggcttttctgtccatggaattctccaagcaagaatactggagtgggtcgccatctccttctccaatggcaaaatcttaaattgcagtaacacatttgtctcaaaatgttcaatgcttgacctggaaatatatatagtaagatgatatagtggaaactctaaatactcttatgaaacaaccatattacaagtatattagatttctgctgtttttcagtcactaagttgtgtccgactctgcaagtccatgcactgcaggccaggcttccctgtcctacataatctcctggaatttgctcaaattcatgtacattgaggcgatgatgccatccaaccatctgtcatctccttctcctcctgtccttgatctttctcagcatcaaggtcttttccaatgagcccgctcttcacattaggtggccaaaatattggagcttcagcttctgttcttccaatgactattcaggactgatttcctttaggattgactagtttgatctccctgctgtccaagggactttcaagagtcttcttcagcaccacagtttgaaagcatcagttcttcagtgttcagccttctttctgacccagggaatattcactaggaccccaaatctgagttaatgtttataagaatcacccatgtttctgagagtagagttgtacagaagatggagagtaaataactgtcccaaactctgtccaatcaagactgcagagtattggaatagaaatgaacagacagctttcagtgaatcaggagggacacaaggagctgtggcctttttcaacacagagaaacatctgcttgtcgttcactgtgaccttgtcctaaacaaaagcttacacatctcaaggatgttttaagtcaaacaaggatttcatcactcatatggaactcaaagttaaggcctgctcaatgtcaagaactcaactcacttgactcttcatatcattctttaaagttgtttgaaactgaatggctcctatcaacagtggtacccagaatctaagcttgaagtggtgttgattccaaaagttcaagacaaatggccttgctgacctgagagggtcctcctctcccccacctcacataaatggcaagaagatgggaacagctgggacccgagggttaggtgatgattagaaatccaaggtgcatgttccattcgtatgcagccactggactggccagagcaaggtggattaccatgactacaccacccatgggaggtgggtactgtccccatcaatagcggcaggagagaaacactgagaatgaatgatacgccttacatctgaaaattactacagtccaccaagaccttttcctcagactattccccaatatcctcgccacatgaagtggtgtggggtgggggtagggtgggaaggagcagggctagggaagtttattacaggacctccacttcacagatgaggaaaccaggactgcaagagatcaagaacttggcttaaactctcatctttcgactcacatctacagtcttttcattctgttctgctgctgttggaaattggaatgagtgtggggtcagtagttgtggctcatgggctttagttgctccagaaatccaagagaaaattttctgcagctaagacaaagaaaatgggacttttactcctcaatttgaaaatctgatacattgaggcagtggttagaaactgcttttaccaccaaggagccaggttcaatccttgatcagggactaacagcctgcaagctgaggcacaggcaaggaaaaaaaaaaaaaaactctgaggaggggagtaaactaggagactgggattgacctatacatactactatatataaagcagcttactaataaggacctgctatatagcacagggaactctactaccaatactgtgtaatgacctatatggggaaagaatctaaagaagagtggatgtaactatatgtataactgattcattttgctgtatagcagaaatcaacacaacagtgtaagtcaactatacactaataaaagctcaaaaaaattaaataaaaccattcccagatcaaagaaatccaagatttcgtatggctcaccctataaagacataattaaaagctatttacagaactgtctgtaatcctgtcctttcttggaactaagggttgtgaggcttccttcctttcatacaaagtggcacatgatagatgacaacccggcctccttccctgtctgcactcacccctaagtcaccctgatgtgcaactgtgcacgtaatataagattaattcgttacacaaagtctggttgaaagaggtttcttaaagtgaaaggaccaagaagaaacctcattcaactagagaagaaaaaaggacaattgtcacaaatggaaaaagaagatccttaagatggagaacagatacagtaggacgtgcaccgggcttgcctgggcttgttggtcaaaatctatgggttctcagttttgccactggtataatcaactgggtaaagtcactcaactgatgcactgctcagaagaggtctgtgggtagggagtgtctacccctcatagcgtttaatttttttttttaatttttatttatttttggctgtgctgggtcttcattgctgcacagacttttctctagctgtgacaagcaggggctgcttgccaggcgcggggcacaggcttctcattgcggcggcttctcttgttgtgaagcatgggctctagggcgcgtgggctcagaagtcgtggctcacggctttcgttgctccaaggcatgtgggatcttcccagaccagggatagaacccacgtctcctgccgtcgtggcaggcgaattctttatcaatgagccattagggaagcccctatggtttatttttaaacgtagaccaaggcagagagaacagtgtaataaatccctatttaaagtccatcaacactaccagtttttacttcatctcccctacacacacacacaggagaactgtaaggctaatcctaggcaacatgccatttcacccacaaatattttattgtcacaaggatatttccgagataaaggaggatcatactatgaaagcttacaagaaacagataagctcacggaaaaagaaaaggcggcttcagattacttgccacagtgcttaaatccaggtctacatttgatcattggcccactagaaccacagggcttcttttaaaaagcaacccaaccatgatctggagagtgatgaggctggatcagagagggatggctgcaaagctcagtgggcagccatcaccctttccacccccgtgtcctccaagcagaagactgcagagataatccttcctgactgctaatgtcctcacaaacatactaggagtgactaggagtgggcagaaaaggctgaggattctggccagcacccaaagggcagatgtcagactgcctggaacaacagaggaggcgcctttagtccttcaggtcaacagagacagcaaaataggattgctagtgactatctctggagttacttgtccctggaaaatccttactggcccgtgagaaaacttaccctatcaatatgctaatatctcagaagacttgaacaaggtatcttgctcaaattctctctcattgatggaaggatgggttggagctaggaaggaagggtcccctttgtcctacactcctaattgttacaggcactagaaacttggcaagccaggacttcctgctgagggagtcggtagaatccacaaagctgctggctgaggttaatgcaaaggagggaaccatgtcccgcctctgtccctcggccccattttcacaagcctaatgaagtgacaaagcaatgagagacaggcaggattcctggctccagcaaaaagaagagccccgtgtgtcccggggatgggccgacgatcccaaccaggcagtccatcactgtcccaaacaatgggacaccctgtccccaaaacagtttccttatcagttagaaaaaaaacaactggtcttttactaacgcccttgaagtcaccaactagtttgtggttgtttttttttaaaggaaggaaggagaaagcagctgcacagaaaattcccaattcatcctccaatgacctgactgaacaaaactgtcctgctgcctcggggaatactgacactgctagggtgcagtgcgccaatcccaaaggtcgatgccttttctcggagagatgctatcctaggacaaaagcgctggtcctctgagaggcgaagcagcgtgcagactgcaccggggaagcccagcctgggaaccaaggctgcagagacagccaagcatcagaacatctgtaggaagtgacttcagtccctcccttctcccctcacccaccccaaccctccccatccccaaaaggagttttaacacatgattaccgctgaagtcctgaggatctggtgactcaccagactcacacatggttccaatgagcccttgaccattacatggtaggagagcaggaaagacaaatgaaagcggttgtaattcggcagcgcggagctcagacctgccagacaaaagggactgcgggcgtgttccccaactcgttcaggcacctgacacacacaagctatttttaatcactggatttattccccccaccccacccccactccccttctccgtcctccacctcagcaaatgtttccatgtcgaagcaaaccccaaatcaatcccaggtgttcagggaaacccagagaggcacttccgctccaggaactgggccagaaagctgaaccatcccctgggtcccgcagctacgttttcttgttctttccttacttagcacagttcagatcacccaccccaaacactgggcacggggcctgaaaggagaaatacttgaatgagcgtgccctgctggaaaggctcctgattctgtgctttctcaagcagccctggagagagaaggggcctgggacaggcctccaggatcaatcactaagagctcaagggcatcctttactccttaggattctctacctgcctggcagcaaggagtaaattaaacgtgtgaaaattccaaagcctgttgttgtttagtcgctgagtcctctccagcactctgtgactccatgggctgtagcccaccaggcttttctgtccatggaattctccaagcaaatatatcggagtaggttgccatttccttctccaggggattgtctcaacccaggagtcacctgcgtctcctgcactggcagacggattctttaccactgagccattgggtgtgcaaagcccagtaagtgctcaataaattactggtgacttacactgaactgaaacgtgtcttgtaaaatagaaagacatatatacatatatatacacacatatatatggtaaaatagaaatggtcttgtaaaatagaaaaacacatatgtatatatacacatacagttcagatggtaaagaatctgcctgtagtgcgggagacctgagttcaatcgatgggttggaaagatcccctggagaagggcatggcaacccactccagtattcttgcctgaagaatccccatggacaatggaacctggcagctacagtctatggggttgcaaagagtcagacatgactgagcaactaagtacacacacacacaattttatttcccaaagcttagagagacagccaggagaaggagcatggagatttccccaagtacaaccaagcaactgagaacatgaatgcgaaaatcagattctgagatatacatggaaactgacaacccccgaatctttatctcaaaaaactccttacctattctgcatcctccaatctgctagggggaaatattttttgtagcaatcatcatctatgtattttgccatgacaacacctcacggctccaggagccagaagacctaaggcatcctctggttttaaaaacttcctaagaatgccagtttagagtcagtaaggcacaaaacaaaactaatcttgtgcacaaaacttttttccatgcttgtaatttgccagaacccaaactgcattttacgcgagtcatgcatgcgcccttaaatgaatagcatgctcacaatttaaaagaatgttttcattattgagattaagattcctgcatagaaggaaggctgcctaacccaggcctcctgcattgcagccagattctttaccatctgagccaccagggaaccctactttaaagaatacatttcctaaacaatcattcaaagccatttacagagcagatcgcaggtttcaaatcatttcctatatagacagttacacttgactccacaccaggcattttataagtcctaaacgtctcagaatagagtcactccttttgtcatggaaaacacaagaggcgaggtctccatattactcaggagggaagccctcattgggccctttgagctccaaagtttgcagacagtcaaactggtgcaacacagggttttcctggtggttcagaggataaagaatctgcccgcaaagcaggagacctgggtttcatccctgggtcaaaaagatgccttggagaagggaaccataacaacaagtattcttgcctgaagaattccacggacagaggaggctggcaggctacagtccatggggtcacagtcagacatgaccgagtgactaacactttcgctgcactttcacacagtgcgtgcaccccactagttcttacctatcttagacttttgggccagtgtaaactcctgccctgccttcaactaaataaaatactcatgacaaggtcagaaggctttggcaacaatgtggcaaaggttaaccccactcaagaagactatggaaaatatttgagatcctacatctcgctattgtcccagcttccgctctttcagtttacgcacgactctttgatgctccactctgtgaggcccttgagatgctggctcatcaggctgcccaatttgtttccacatcacctgattcccacctatcattttcggtgctgctatctgagaagaggtttacattttggaaaatgtattcttccctatgctactatgagcctgaaaacaatcaagtgtccagtattctctgcactacataggtcagggggtggaggctcacaaagggtccttaagtgactgaaccagggtgaccaggccagttgagtgacttcaccagcactcagactccatgttcagacacaaaagctgggtactttccacctattaataaaagttaagagcagaggaggcagacatgatggacacaagaacatctcctttcattttctccatcattctcattacagaggaagttctttctggaagtgtctcaattcctgggccactcggccgacagcagctgcaacagagcttgagtctccaagacccatcccacccagaaccccaagtcagaggctcaagacttgcctatacatggtctgggggaaagatgggcacggaggggctgtctgagcatcatcggaagactgggctggtcaaggtggaagacgggcagttttctccgtgggcaaaggaaaaatctggacaaacaatggagtggggcccttttatttaggctggaagaggtagagtttttctgcacttttgaactgttttctcaaggccggcctctccctcccacgcaggaaacaaacacagagacaggcttattccagtgagggctccagtcactgagagctaccggggcaaagcagaaggaagaggggctggggagcaaggcaggaggagtcgggggcagggggcagacagtgaggagctgggagaggagaggagagacagaggggaccatgaagacggggaaggatggatggcggagaagggagcagagggcaacaaagggaaaagcaggaaaagccaatactgaaacattttaaaccagaataaagggacagatggctgagtagaactgggctgggaagagtccgggacttactcccaattaatgatgttcaaaaagcagcatttttccataaatttcgaaaggaaattctctcttgtcttttttatttatttatacattatataaatacattttcaaaccaaaaaaaaagggggggctgtttttttccaatgggaaaaaaaaaaaccttgttggagatgaaagccagtcttcaaaaacccctcggaggaagctaaaaccccacatgtctcggtgctgcagaaagaaaaacaaagtggacattcttcctgtgttctaaggcttttttatgcagatgtgtttttcttttaataaataaatctggacagagaagggaaaagcatactcctagacattcacacagtgcaactgtctgttttcaacccagcgaaaccacaatgaaaaaataagaatatttaagcccattttcccagtgcagagacaaatggtctcaaaatgccaaccattctcaaaatgccaaccacaggcactgaggcaataagctctgtgtgcacccccaagcttcccaaccagaaaggcttatctgcaatgagtaatgacaagcagagaaaggcaggacctggggcagggtggccatactccctagaaaggcccagagcggttctcacttacaacattcagccactccacactttttgagccattgcatttcactttaagactgcaataattattttaaaacacatgtacacactgagtttaaaatctgccttatgtccacccattggcctgagcactgttggttgaaatgacacagtagaattttcatcttttttcatttatcagcttttcagtacttttactcacccctgtgtcatcagttccacccaggtattaaaattccttggctccttcatccactggtgatgtcctggtctggccatgcccccaccggaagccttcctgtatgcccaaatccctttagagcattgcaaacattctcggggggaaccagacttctcaggagacaaatgagaacgtggagaggaccagcctactcctgcaattctgttggtgcagaccaacctcaatcattctaaaggccattctgcaaaaaccgctcaaagtaccctgcgagacttcctccacaggttccgaggttgagcccgttctgcacctgttgcatgggtgtatgttaagtcgcttcagctgtgtccgactctttgtgaccccatttccttctccaggggaatcttcccgacccatgggtcgaacccacatctctaacccacatatctttagtctcctgcactagcaggtagattctttatcactagcatcgcctgagaagcccctgcatctgttgactaaattttattaacctcaggcaaagattacgtttatctgtactaaacttcaccttgttcaaatccacatttccatacatagagctgttttttagaccatgaatctgtcctcatcctattcgagttggcccatttgaagtttattaagtagactttctgcatctttctctcatctgagcccccaatataaatgttgaaaagtcaacaaccaagttctgtgacccatggcataacaccagagataacgccagtttgatactgacgcactgatcaaacaccctttgggtctagctgctcaaccaattatacatcctcttgcctgtactgtcattggatccacaggtactcaatctggccacaaatatataacagaaagagctggacaaaatcttcagtggactctgtttatccacccattggggagctccagacaagttcaaaggcagctgaggaaatgcagaagctgggactcaagacacctgcacaatgaaagaaagatggaaaatgggaggaagggggtgcggggggagacaggaggggaagggaaaggaggagagagagagagtagagcctaagactccagtgctccagccactctgcttccagaaacaatgggcacttagagaacaatggctgcagacaaagtcttggtctatttttatctgccactgtgagtcccagacaggaggaactggatttctgccctgtgcgcgcagctccaactggatctgggctgggaggaagatgaggtcactgagaacactgcctgcttagaaataggctccgttgttttggttttttttttttcctgctcgcagagtagttccttcttagcctaaaggctctctttagccaagtgaagaagtgtgcgtgcccactgctaaaaacacagccatgtggagaaggggtgggtccagactgcaactgccgctcagtccagcccagagcaaggaagggaagtggggaggatgccctgggaagcctgaccactggacagtcagctctatcgttcctaagatgacagccccgacaggcctgctcaccacacctagctggagtcctcctaagagagactctccagagcaaagctccctcctcgattctctggagcataaagaagttgagggctgatcttcatggatatgtgtacctcatgtctcaacaaaggcctcagactgccctttgcttcatcctctttgaacagtttctctcttttctggaaatgccatcttcagctctgacagagctttggagtgacaattttaatccttcccatctgtgttacttatagtcttaatccttcaagagggtttctaacaaggaccagcaatggtggtataagcctgtgacagacaccagactgaagaaaaccagccgagtctgggccagggagacccaggagtgagtcccaggagtgagtctggtcggcagccctcctgtaacccacagaattggtaactgctcccttggatccagtccagccctacagccttctgaatcctatatgcaaagatggaacatcccaaaggcaagaattcatcttgccacggattcatctagatgcgcgcccccgcaaccagggaaaaacctcccctactcatgcctccaagttcttgccaccaaccttcttgctcctgaaaaaccaccaggtagaaaggaagctgaagatcgttttcctttcatttaaatagctcagggtgtttttcattgagaatatcccaagtaatgtcaccgcggggcttccttggtggctcagaggtaaagaacccacctcccaatgaaggagacacaggttcattccctgggtcaagaagatcccctggagaagcgagtggcaacccactccagtattcttgcctgggaaaccccggggaaagagcaccctagctccatgggctacagtccatggggtcgcaatagagttgaatatgacttagtgactaaacgacaacaaggtcaccgtagggagagggagctggaggtaggcacttaaatgtcttatcatttaaaagcttaagcacagagcaggcaagtagtgcccagggctagggccagtgagctcagggctggggctactataaccacagaatggttagaagtcatgtactgggttccttccctggcccacactctctctgttgacttcagaagtaccaggcacattattgcattcagcatagtaaacatctgtgataaactgagtattagttctaatcttccttttgactttgggagcccaaaataaaggaagtgatactttttttttttttaagtccaggggtccagacgttcatgtcagaccatctgtagagtggtctcatgaacttgaaataccagcaccacctataaggccatgacatgcaaacatttctgtcctaagcagatggtggagactgaaaccgaggtgaaacatctgaacccctaatgctggggtcactgaacctggttcagaactcattcaaacagtgtttccttgactcctccccaactccagctcccaacaggccaagttatcatccccttctccaaagtgtgaaagtcgctcaattgtgtctgactctttgtgaccccacggactatccagtccatggaattcttcaggccagaatactggagtaggtagcctttcccttctccagagatcgtcccaacactgggatcaaaccccaggtctcctgaactgcaggcggattctttaccagctgaaccacaagggaaactccttctcctccaagggccctgctgaatcatcccagtgtcattcaagagaaccacgtgggagccacgtggcaggaacaggaagaaagcagaggaccgcctgttcccaccccgaagagactgatatcagagaagaggcagaacttcccacccatagtgtatctggcaagcgtgtgagacagcccttctctggatctatcacagtcttccaagacgcctgctaaagccaccaaaacgcacaccagctaaatgcaccccaaacccatgtgaaagcccagcgtggagcatctggaattcacagcatcaggctttatgatgttcagccactcatgaaataatggccccggtcagctcaggaaatccaaatgtctgtccctaatgaggaatcagaaatcgtgttgctttaaggggtttagggactaatctcagcgtcccggctcaggtttcctgagctgctaagaagctacttaggaccctgagagagagctttaaggaatctgggtcctctccctaaaccactaggttccctgttaaacccagcatctcaggctgctcccaggtctgtttattcctgatctagaatttcggccctgagatctattctgctttggccttctccacagccctgggcaggaacgggcaccccgtgcaccctactggcggcttcacacttttcctcacctctgtttcctctctgttgccctccctgtggttatctgatgctcacagctcatccaggaacaaaaagggacaagaggaattcacagaattcgctataaagctttaacaagcccttggagggatgttcccccttccagggaactgaacgtaattataagatgaatgaaaggaagctgttggagacatcaggggcgggtgagcacaggcccacaagacccagttcccagaacacactgggttagagggggcttcagacatcacccggggaaaacaaagctcaggaaggtgacatggtcacgtggttactaactctagacctcctggcttcctggccagcattctccatcctctgctctgttccctttgcacagtggattgggagggagacagcctctctcctctttgctgctaacaagccctggtcatcattctcaacaaactctcctcctccccaggtttacactgaccacagaggaacaagccacccaaaggtctaacagatctgacttgggatataaccggcccctgatgggatcagcgcctcctccgtgttatgttttcagccacaatggtcagactcccctggaaaagatctcccttccagcagggatctcagctgaatgcccgggatcacaaagcaggaatctccaacacccaacttcagctacaccaaacctccacgcacaacggttctaaaatctgcagtcctattcctatcgatccagaaagagtgaaggtggcagttaacttcagtgatccagcgacctccttctaaaaagcactgaataaagagatcaccactgggtccattccagtcccgatggtacaggaaggaaggcatggtgacagcgttgagacgctacaaccaatccccactgaaaaggcaaagcataaaatcagggacattaagcctgaacgttgaacctgatgcatttaattaatgaggccataggtctaactcaaaaaggccaggacccggagcgatacaagcaggtctctttctaacggaaaatgcactcagtgcggagagctaagggttgtgctgtggtctcttgtaacctctacatttttttttttttctctcctttgagaatgaggccccaaacacccagccctgggcgttctgacagcccctcagtggccctggaggtccatgtcggcccggagcagaaaacctctgaggcctctcgcaggggcaaacccaagaggttgaaaagtcgccaggcggacctccatctccagatcgatgggcccaataggccaatgggtggagagcagaggagccgggatcaatgcgaaggggagggagcagaagctgctctccatccgaggcctcaggtgggacagagagagatggaagtgggacgaaggatgcccagccttcatccgctcctggtaagtggctcggccgcatcaggaagccattaggaaactgcagccaccacagccccaagtcggacaacggaagcagccctgctgctagtgaaagggctcactatctgcccagacaccagctccctgcctggcagagccacagccggcaagcccctagctctcctgagcgtgtggctgtgtgctcgctcgcaggatcagggaaaaacagcaggggctctcaacaggagacacggggccacatccccacgggccctgctggccagcatggccagcacacctttattccaagagtcactgacagctgatgggcatggggcttccatcagggtgatggaaacgtcccagagtgatcagcgatggctgcacaactctgtgaatggaacaaaaccccctgaactgtacacttgcacatggggaatttcatattatgcgaattattaaaaaacagtatgtctcaatttaaaaaacagtatattttttttcaaagagctaacaatccgcctgccatgagccaagcggtggggatacctcgataatggggagacggggaccctcccccaggagcttccctgcagtgggaatacctcgaaaatggggagacaggcaccctgccccgggagcttccctctagtgggataaacaaccccacagaaggacacagacagcagctccacatttactgctcaggacgaactgtggggatggcagagggagagtagggggcgacgaaggagagggggccaacgtgtcaagggcaactccaaagccgggtgggtggcattcatgagagggatgagacatggatgtgacctcaggcccaggaaagcctcaggagacggcagatgggcccactcacggaagacaggggagacactcaggaggcggacacctggggtctacaactcctgggagcatttacatgaggaccaagagagaggccacagcctccaggagacaagcagagatatccccaagttctcctcaccccaagctatctccagaggaggctgcctgagtgctcactgaaggtgacaggagcatttgtacatttaaggctttcaggagaagtcgtctccatcagactggctctttctggaggtttctctcccaatcccaagaaggtaggggggtgagaaaaggaaggacagatagaaaaggcttcaggcaaacaaacacgggaccaggctcccaaaccaagagagatgcagtcacagcacttgtgaccaaaagggaccttttggaaaattcttttccaggagggatcttgagtttgggcccctggaatgccccagagcaattctgattggttccctggaccctgactcagactgcgcacgggctccgctccaccctcggctccaccctcggatgagtaaataaactgacccagggactgactggagggagggggccagaaggggagggagggggcagaagcagcatgggaaccaggagaacgcaagagccgactctggtgcaggggacagacagatgagaagtccagtctgctccagagactggtggggtggcggaattcaagaaataatgctctgagccttatacaccactccagttggatccagccctgccctggcagcctgctctttgctgctttataatatactgaattagtcactggcttagcaagcacatttaaacacactgcagcccagctgtttaaagacacaggatccctcttccagctgccagattctgcctgtaaatcaaccatgacaattggcaatgggcagactccagaggtgcagggtactgaaggcatcttcaggggcaaagcgctttagtggaaaagactgctagtgctggcggaggggtgaggtctgctgggcatttgctgggggacagtggggacatgggtatggagaagaaagcacagccagtgggctttttctgatctgatgtttattagctttaggaggctgccaagtggattcactgacctggcccttcccagcagcaggctcacccctggagggcagcctggaggaggcagttctactctgggccgcctacactgacaggtttgtagaggtttcctcctaaacctcacatacttactcactcccaggaaagaggaggatatcctgataacgacaattaaaataattcaatatcctgataacaacaattccaagaaccagccctgcggacctggccagggcctgaacatgctgctttagagctggacccgtgggacctgaggcctggctcgagtttggttaagtgtgcgtgagagaaagaaaacactaccagcagccacagggactgctctggcccccctcggttatgggggtgtcgagtggaaaattttctgtaaccaggttcacagtaaccacagtcctaacaaccaccaaagcagcaacagcactgtcagcaaagaacatctgaacggacagggcagcctgagagacagaggataacaacaccattcacgagaccctctgtcagcggacaggtgtcctacaggaattctctcaaacccttacaagagccctgaaagctccttaggatgacctcctttgtaaggtttataaaaggaaggctccaggaagttaaatactttccctaagggcacaatagccagcagaaaattcaagcacagggctgtctcacctccaaactctgctctttccagggcagggcagtggctgcagggagaaaccacatcacaaccaacgtcatgtgtgagaggccgtgcgattcacggatgaagaagactctctgtggagccacccaacaataggtccctcctctgcaacgatcaggtctcctctaccaaatgggaacagaatgcatctgtatcttaagatgatgctaagaaaccttcggcctaaacagaccatctggtgaatataagaaccgaacacatgactaaaagggtggactacctgtagactccgttacaacaggaatttgaagaagattctcaaatagagtcgtggggttgtttgtgtgggaggggtctcctgtgtatcgtgcactatcttttggaaattcaaacactaattccttgaaactggtttgcccataaaaacactgatagtcttttcttacaaagcaggtggctggggacccgggacactggactcacccgtggtctccccttgctgtctacagtcaatgcctatgagcaatgcaggcttgacccaaccctgtgaagccagaaacaagttgccaggaccccatctcatctaaaacatgaaactgctgttttgttcatccagcgctgcaaaccctttagagacactgcagccagcccggacgtttcacatttctcctatcagtccatccatcacaagtgagggcatggaaaagccacaaggcttccctaagagaggccttcagaaatccagaaataaagagatactttattttaaaaaaaatctccaactgaatcagaggtgaacgctaggtccatcatgtagacactgattcattccgtgcatgtgtttatttttctacaaacattcctgttgcatcaagtgcactcaagatttagacgtgtgcctctgaatatccgctgccttgaggattctcaagcacagggtgggggcgaggggggggctatctttattccttggtttcccaatctggaaaatggaggccgatgccccatctctccttatacaggttcagtaaatttaggtacccacgtttcatttgtccacttttgaaaatgcacgtggaagtgatgggcatatgtctttggcttcctctctatttcacagcccagtggtctatatttatagatagattggatgttttcttccttagcctgagcttaatgaggagcccaaaagagcacacggctgagaaggatgcgtcaagaatcaaagcctctgatgagaatgttaggaatttttctctccaaacagattctaagttggcagaactttgtaattaggaagatctaagtttaaatgtatgacttgaaagttctatgggcttggggaaattatgacagcctttatggagctccatttcttaccttcataaaggaggttaaaccaccaatcttggtacaaactcttatgtataaaacaagggacgaggagatactgtacacagagcatatagcccaccttttataattatcaatgacttttgaccttgaaaaattacgaatcactatgctgtgcacccataacttatataatattgtacatcaaccatacttcaataaaaacaattttaaagaaaaaaaacttttaaataaaaataagatactaacttcctagggttatttaaagaatgtagctatttgcgcaaacattttgcaagtgcctgacacatagtaggtactgcaaaacttttagtttcacttctctcatgtccccaaactgaggcgcagatacatacagagaccaaaaacaagcatctggcagcacgtttggttcccattaagaggccaaggcaggcgaagactgacctcgtgatctaatgtgaaatcaaggatgcacttcctgtacacacacacgattcaccctcagagagttcctaggtattcagcatggccacgctgtatcaactcttctagtgatttaataatgttccttgcatcacccatgcctccagagtctgtaaatgtgagctcattaatgctcccagtctctccaagcaaaggcagctcgctccccaggaatgccctgcttccagggaatgcggagctgatagctaacacagacaggaggctcaacccggcagctcagtgtcctgactctcatgccaggcagtaaaaggtaaaaggggatgagccactatctgggtacacctgtcaggttgtcagcacagaaaatgctcaaccagggaaagggatgactgaggattccgtaggtctaaccaaaatgactcagaagtggaggcctgcaccccatttggaagaggtgacacccttggcagtcacacgaacatttgctttgcaagactaaatcttcctgacaagactgaagttagcacccaagttcaaaaatgccaaataaccctattgtttcctacaatcaggtataccaggctctacacccattgcccgctcctcttccctgagaatccaaaccctgcctcaaaccctggccaggacactgctggccatttaggattaaactcactcccaaggaaacagcaacatgccaaggggctattttccccgtgaagtatctggtcttggaatgctctggtttccagaatgaccaaaacagggagggggagatcacttatttttcttgctaaggaacaacactttgttttaaggtgacaatctaatataacttcagtcaactccaagtgtatatatacctagtgccagagcaaatgaccctgtcccaagtggaaactaacggggaagaaaatcgaaaatgtaaatcttgtacgtctctttggcacagttctttgcctctcctactgtgtgttgtgggaaagtgttattttttattttttatcttgaagtgttcctctggctacctgaaattcatgctcgtcattaaaatggacctcatttgctaaaaagggtaaactgaggctcagaagaccaaagcaattgtgcatatatttcaacctagcgaaacagaagttggacaagaattctttcccaaactccttagactaaaaaaaaataaagtgtatttctcaaagtccaaggttcagcctacccctagaggagaattgcatatttgtctagaagtctgtgaggtaactcatctttttttttttttaacttcttgagaaagaactaactaacctaccatcctacttagtttgtccagtgtttgcatcatggaaagctgagcaaattttccagatcccatgacagtaacctgtgccacctgctcagagctcagtaattagccgactatggacaggcgatccactaagcatatagaaaatacacagtgaaatttctctagcaaaagagcagagaatgttctcttaacgtctctacctccagctaatctttagcagccgtagcagtaatgtgaatgttattatatcatgttctcatcaattcaagaaaagatttaaaatgcgtgtggccaaatggaaatgtcaaggggtttggagaaccccagcttctggttctgtgtcccttactcaccaagtcaccttgggaaagaaacttgccatcacaaatgggcatcagtttccccacttgcaacacaatggtaactccagggatgacctgaacctcaaagaggcggaagtcatgtgtcaaactgcaaaatgctatgggatcaggaccaaggaagaagtgaaatagtaaacgatatgcacaaacagaccttagtatctccccaaagtaaacaaacacccaaatatttttgagaagggtgacctctggcatgaactccagctgggcttaaatctaaactccacgcacccactgtgtggctgtgggcacattgtttagcctcacagatgcttcatctaggagacaggaataatactcagctattagagatgccataaaagaatgagattcttggcacattagtaagctggcctccaacaactaacagaaaagaaaaaaagaaatagataaaaacgagatacgagatgcgagatgcctacacaagcacacatggatcaactctgccctcttatcagtttttcccccaaacttgcacgctgatctaaggtccctgctcctgcaagaaaagggcacctggatcaggcccaaaatgcagcaatcacatcaagaacttgattttcagataacagctatacacaggcgccgttcctccactgccattgaaaggccagcagcctacgctcaccacaccccagcacatactcgcagcttcctggacctggggaaaccagagcagctgggatccccaggcagccagccctgtaggaaggccagaccccgatccctgagcgcccagcagccagggaccgggcccctccctgggtacaaacaggagactggggcctcaccagagtggctttgaacagaacgcgttcctgctgcaggaggcgactgtttacgcccagagcagtgctctgagaagggcagctgagataaagcagctctggctcagttcacagtctcagttagccctggggatgcagctgggaccatggacctgctgaggacccaccttcctccagagcagaccccacccccaccccacacccgccagactggagctgcttcccgctgcagtggtagcaaaggttgatggaaataggaagctgtttcatgaatggggaccaagagggaggcgtcatgcctggtccagcatcaccccagacgtgcgtttctccaactgtaagcaaggcctgggacaactcccaatgcctctctcggtgaacggtaatctttgcagatgtactcaaactcatctcaaggatggaactgtgattaacagaatctggggatccagagaaaaatatccctgtttttgctcacctcttgactgacatttcatgctctctcacagcctgagttatttcaaatactatttagagtcataaactatctgggttaagagaaaccttacaggtcgtcttctccattgagttttatttcaccaatgaagagtctgaggtccagagaaaggaaattacttgctcaaggccatatagataaatggttgcaaaaccatggctagaatccaggcttcctggctctccaggcagtgatgggtcccccagagtggacatgtgacttagttagaacacaaaatgtaatcctaggaggctgagaggtctccctttatcattcataaatcctcattgcattccaggcatttaattagcattgtaatgaaataatataaccaatgcataatgtatatatatataataaaaaaaaccctaggcagggaacctcaaatagatagcaaaaagaaaaattaatactaaaagtatagaagtcaacacatggaaactttcccacagaaaattccctgtagtggattttctgaaaggtacttgaacatcagactcaatcatacactctcatggataatcatagtgattatccgagtacaaaactgtaattgcacaaaaatatctttaactgagtgcatgtataataccagcacacagtaggagtttctaaatacacacttcaaaaaccatgtatctacaaacactcaccagggttaggaacccttggcctgacctagattcttattttccatctgaaccttgaaaatatgtacctgattgattctgtcatcttcgctgaggtttaacgcttattctgataaactgatatagaggttttaacaactaacagtatgagtgggaagtaatgcgaccaaataaaaaaaaaagacaacagctctctcataagcctttttaataacactgctcttttcttacaatctccctattttcaaaggcaaaactcattctgagatgcaaaaggttctggtgcgggtcctgacgtgacacttctgtctctcttctctttctacaatcaaggtattcttcatatttatgtaagcctttcttttactccaaactttcagcattctccccacgctactctatttaaaataatcctctccatgtttttagcacctctttcaaatgcttttgaaatacccatgttctccctgaagctgacccaggaaattactctagcctagaagtgttgcccaacagacagaaaatataaacaatcactgacccccacgtacttctacaagttcaagtaatggtcctcttgcactattggccatgaaagcacctggagcacagggtctattccatctgggttgccctgacttgtgcaggatataaagtattcagaaaagacgacacagacagagtggaaacagcagatccaagactacccacccagccacttggactggaattcctacccaagcgccatatttggtccatatgggagttttcccaaaaagtctataaaatttcacttaaattctttaatttttttatgttatttcctttcattctttcattactcctttcataatttcttactcttttctccctcacctctcttctcttctttttttagagaaaagagatactatggttaaatgcaccaattcctttcctcccatcctaaaaaatgaagggcttacatttttatcctttgtttttacccctgttaatggcacaaaaaacacacttttttttttttttgccccttttgatcccaatgtaaaacttctcatctcggataaacattacacaaaaaaatgtcatcgtcttcacatgtgtaaatgaaataaatagggggaaatattggcatttccccctactcagaagttcattttcacacacacacaccctacatgcttaaagcttacagttcctctgcagaaccttgcaaagcagaaatcaacagctcagcagagctccccaaagctaccaagaggtttcaaatgcttagatcgaacgcgtttgaggttgatttttagttgtttcccagcctctgagaaatattctgtgtcaaaaacacatttaaaaatataactcacagttgggggaaaccacacagaacttaatttcttcaaactctgactcttgtccttttaacttactctggatggcctaaaaccctaaaattagcaactcagagcagatatcataaaaatactattgtccaaaatcagtgtctatgtggtgtgcacctggtttccggggagagtcctacactacgtttacctctcattctggtataatccctgaacaacccttatactctgaaaagtgtcccagtttggatggtaaattttaagcacacaccgtcaagatctgaagtccaacagcctacaactttccgatgctgcactgggtcttaaagcaccattcgggccagtgtcctacagttctcagagccagaatgaatcgctacagaaaaaggacaatggggaccagctgatgggcagtaagaagccacctttccagtgcccagtgacaagcctggtcccaagcagcagaaactggaaagaacatgggcaatataaagaacctggccaaataatcaataaacacttatggctcaaacagcaatattttgagtatttctgtaagcatggctccctgccaatgaaattggatctgctgtaacctaccctacaggccaatttctttctgtatctgcatggagactataaactacacaattaaaaagaaaacagtaacacagataggcatagggcttcagagaagtggccaagtagaaataagctgtttctgcaacttgaaaaacgtatactaatgttctggaaaaagatctcttcaacccaactccagcaaaatggagttgtagatacatgacaaagaagcatgacagactgcgggactgtcttgacattccgaaccctgagttaagaacaacttaatagctgtaagtaaaaaaaaacgaagaatgctgagagttgttttaatcgctaagtcatgtccaactcttggcaaccccatggactgagaagagctccccaggctcttctgtccacgggattctccaggcaagaatactagaggggtttgccatttccttctctagggcatcttcccagatcagggattgaacctgcttctcccgcactgacagacggattctttaccgctgagccaccagggatgcccagaacgctgtgaatagcgtggtaaatcccatcagagatgccgtctgagcaaggggatcaatttttcattctagagcagccagataaacacatgaggacaaactgctctctgtggtaattgtgggagcccaggggtactgtatggagaaaatgctccccataaggcagtgactgaggaaccaagacctcacccatggacaagctgccagggcgtctgttggtttccctctgagctgtgggccgtgcagggtgagcaggtctcacatagcatcctgtggctcaactttcctccttgtaccagaatacacccaagattaaaggtaagaggggaagcgggggcagagaatgagatggttacatagcatcatcccctcgatggacatgggtttgagcaaactctgggagacagtggaggacagggaagcctggtgtgctgcaatccgtggggttgcaaagagtcagacacaacttagcaactgaacaacaaaaacagcatgccctgacccatgacatgggcttgaaaactctacactttaggcagaaaaaaaaagtaaaatgtatttgctgcacagacaacaaacgcaggtacctctggcctccttacaagaagaaaatttaaattatctctggaactaagaaaacaagctagttactgatctatgtctcttgtccctctgtttgtgagtgagatccacgcagagctgcgtccatgatgaaagaggtaaaacaggccgaatggggaagctctgggaaggatgcaaccttggaagtaaacacaatcccgtccctcacctgtgagaaaaagaactccgtctggaaagctctggaaaaaaaaagaagcctggttctctgcttggtgatctcaggcaagcgttactggaatcttaacgcatcttcttaaagcaactcacctggactgctggccctggagggagttcacaggacagacaggcccttgccccctaactcagaggagccatgcagggtgaccgggaacccttgccccctgaactcccaaagcaccgaccccgccccccgcaagtgcggcctcttttaattccctggctttctgtgaataacatggtgttttacctaacatataaaatgttccgcaaggctcatcaatttgtaaatttctaaccttgagccttgaggaaattatgcatatcttggaatatcctcctccacatctaaacaagggatataataatacgtcccctaccccggagtcgggctgtcacatgggaaagaccctggttcaaaacgcagattcaatacatgtttcagaaataccccctacaacttggcagtggcaggaatctaccttcattgcaaactcagggaatgccaccacagccctgggtgattcattctgcaaaccagcaacgactgtaattactctgtcgctgtcgcagagttatctgtgctctttgcaatagggagcctggctttcctgaaatatcctgacctacgctaaccagctcttggttctgcacagaatttgatggagcccagagcaagctgagctctggtagggtagatctcaggctggtctgtctcctaggaagtgatccccctacagggtggtctggtctctttaagaaagaaaaaaagttacagagacaaaaaaaaaaacagcaacacaaaccaaccaaaaatgccaggaatgcaagctctgccaaccaaataaataaataagatgtgagatactttataataactggacatgatactcttctcaaccctgcataactgaaaatctctgcatttccatcagctctacaaatgtgccctgcctctgctcccaggcagcactgacaacctccatcacccacagtaactgagtctctgagcctgtaactgacaatcaagctccagagatgccctgagcctctgagcgtcccctggttcactgagtttgatgtcggggacacagaatagagtgtgagatctcagtgaggcaggtgaaaaggtcctctctaacttcactcttctttccctctcaagtaataggggaggtacgtaagacggctgtagcccctataaaacacttcattctaacccctccacccacccaattctacagtcaccaaggtcattttgtgctgttattacagattagcactgttttaagatatgcatacagtaacagatttatttccatcaaccctatgaggtagaacggtgatcatactcatctgacagctgcaggacctggaacacagagagatttgttcaaagtcacaaaactagtaagtggcacaactgagatacaaaactagccaggctggctccagagaccctgctcggaaaggagaagggtccggggggggggtctggaaacacggtgaaagagtgatcctaagagcacggcagctctgcgttttttgtctgcatagttgaagttacaaagactgaccgaaggtgctgggaaaagacgaagcttcttcctgtctcctaaggcaatacaggtcagagggatggacagccttttctaggattggaagggggctgatactttcaatcttgtaaaagaccgaacattcagaatcagaattcctgctcttctctgagcattactgctcacctcaccaagaaggtgaagtggggaaggagagaaaaaattaagcagctgggatgtatttgctttggcacccagcctccaccccttctcagcaaactccacaccaggtgggaacgccacagactctctgtggtcgtgtttgttttaactcatttaagctccgagaacccagcaatcatgtattacaatcaaagtgatatatgcaactttacacttacaagggaagttcaacggcaatgttatttccaagtatatgttcatttggccctaaaagctgtcacaactccaatgaggcctcaatccagaataaaagtgaataaaagttcttgatcagaccctagccactgagattggcaaataaccctgggctcctgctgggacacccacctccctcctgcctctctctccagctctcatacatttgggggggggggcgcgggggacgttgcagaggtgatagctggtctaattaatgaaaccagttcagttccccccaatagttgtctccacacgtaagaatctaaacaagccaaagaatcattctggcaaacatttaagtcacagctgtagacatgctatgagacattaaacttttaaaatgtcctgtatggtcttacaggcaaagcaaatctccactttgccagtgagtgtcttttcccaccaacaaaagccagcagccctggctagtgcttcctgcacccctgcacctgcaagttcaagtctcaactgaagtttctctgccaagctttacagaagcaacttgcagtattactcaaggcaactgtacactgagaaggcagaaacggagatatattgcacttgagctgctggctcaccagacattcttaggtaagtaacctaccttctctgtgcctctatttccctttctgagctatgcgtataacagtcacatatatgctactaaccctccagaaaagaaaacgaactcaaatttagatattatatttgctctgtactttcaagattctctatttagttttcccaagatagcaccagaaatcaaatctcattacaatgaatggctgaagacgtcccaatttctttgatcagctgaaattttgttgtactgaaggctgttgacaaaatcagatcagaggcatgtaaaccattttgcaaaggaaggacactgtaaattcggttattataatggtgatgactgcagcattaggcctcactgtccccatcttacagatgggaaagctaagaatagttacttgctcaggatttatttttatcaataaccaacagaacagcatcatctacttaaaacctctaatatttactaaaacactcccccaaaatgcttccgctgtttactgtgatctaaaacatgtgttgctagggggccctttttccttcccagcacaccaaatccactgtaggtttctgaactgacagatccacacgctatttcccagacaaccaaatctgtctcttccccataaacatacatataaacaagccatacttaagaaaaggaggcattagttgagatctgtctttgctgggaattctcctttcacttcctctataaatggttagcatcaattgggactaagagaatttattctggcttctttaacaacacccaccctccagcccccaaggccaccatcacaccagcatcatttctaaactgtagctctctgtgcctgaaatgtctccgaggttctagttcatctcagcatctctgtgacaacagtcttagtctttctctacctcccagggagcaacccagaaaccctgggcttgagtgttagggggtctaagagaagtcaccacccactgctgtgtcttcattaaggtctctgaaagatcttcaaataaaattcagcctggcttgtgttgaaagtttaagcagattaagaaagggttaaaataagcaactgattacggtggagacaaaagaactgttaaccaccgcaccggctgaacttattgatcatcagatacaacagagctgcctgttactgcgattaattattttccaaaagcatcagctcgtccctctacatctttctatatacttttacctccaaaatcatgaagttcttaaggacagctggcagttcctatcctgaaagaaagcatcttttcttctcaaactgcatttattccagaaattctagagtgccagagtccattaaactgctcagcatcaaaaactgtgtctaagacaaactaaaatttctttcctatccctttcttctgcaaatccaagagctggacaacacaccaaccaaagacccaaaatcacatttggtgttgggaggttttccctcttttcatagatcttaggtagcaagggacaaattaatggcagattagaaagatggataaagtaacctgcataaacagaatggggatgtttcccctagtcaagatgatcatttcagctctgcgtccatctccataccctcaagcccgaaaagagacactagacagcaaaggaacatgtgacaggagagctcaggaaggtaggacatttgaaaatgtgcttgaaggccagccagttagacaccctttgggctcttactccccagggctctccatctagctccaacgctgggcgatgcggcagggtcagggaatgatgtcctaggcggcagtgtccaccctcactaacgttaaggaataaggccagagggttcccgctcatttggaaaaataagaaaacaggaatgggggtgctggacattctaaaagctttttcccactactcacaaaaacacagctgtgaaaataaataccaccccccacccccaacaagggtatcgggccaccaacagtccagctcttcctcatgtctacatctttccagctgccaccagcatcgcctgcttaacagctggggcagaaacgcaccacttgcctggaagggaagatcaccgggggagaagtggaggggacccaggccagaggccgagggctggggttggggggcctcggcagtcaccactcacccggggaggggaaaagctccatatccactttttccgtcttgatgatggtgagagtcggtttgagatcgacggccgccttcatggtgccaggaatggggagggggaacagacggggctagagcgagtttgctgttattcttgtttttctttttaatgggaatgagtaacaagggaaaggggacgggggaatcggaccttcttctttaaaatctcaaatttccgctgactttgtcccgcgcccagaaggtgagcgcccggaactctctcctgggtagttggcactttgcgggaaagtgcgcgcgcgccgggtccccgcctcgcctgcgccccgccggctccctcctcgtccgcgcccggctccctcctctccgcgggcagccgcctgcgctcgccctcgccctcgctctccagagccgactccctccctcgcccgcgcgctctcccctcctctttggggcgtagctcgcggcgccgggcccgggcagtgggtctgcgcgcccggcccccacccccaggatctctgcggggcgggaggggggggtgtcgaggggactcaggggcggggcgacgagaggcgggcgaggccgggaggcggggccctgggccctcggccaatcgccggccacggcccaaaccgaaaggaagcggggcggagctcggggcccaccgcgcccgccgcgccctcggctcctcgcgccctgcagccgggtcgcctgggagccgcgcgcagagccggcgggccgcgaagccccctacctgggggagaagagcccggagcgagcgggctggctagtgcccgggccaccccggcagtttgggaaagtccatctgattctccacgcattcttgaggacttggtcacccgctcccgccccctcccgggagcggcatagttttccaagtgcgtgtccatcattcattcataaagactgacacacaggacgtgaggcagcggctggaggggcgtgcgtgcgtgcgaacaaggggctctgagccagtgtcctcaaagggctctgggaatgctggactccggccgcttagtgactcagggatcggggctgtattgctggaggagccttcgattttcccagagcccacccgcgtcatcgttaagaaatcaattaagaagtgagctgcccttgataagaatctagctgccactggtacggatggagcccaaggctgcctcctggagaccccaaaacaaaggcccaacgacttctacagtatagtattagtaaagtcaagaaccagggccccaaactggaatccagtcctgggcttccttgaacttatagtttccctacagcagtggttctcttcctctaattatatcaccattggccaaagttttgtcttttctttcacaaattctcccctactagataaaactgacaaccctactattgccactgtctaaaacatgatgcacagctctgtggtttgaaatttctggagtatatcattcacagccatgacagaatcacagtttcagcccccttttccatttgggaagcccagacacttaggatacgctaacatgacccctgcgtaattaatagtttgccagtggcgcattggttataaacggagagagttggtcctaattaacaaatcaagcagtagacccagaggtgcacacctagacacacgtacagatatcgggagccaggcattgatacctatctttgatgaactaaaagagtaaacataaatctctctgaacaacctcagaggaagctatttttaatcctgtttcctgatttctaagcatatgttgaactcccaccacatggttataactgtaacctcagcctctgataagtcttaacacacctgcttacctcatctaactccagttttgtcctcttgaagtatagtaatttacaggtttcccacagccagggagggaaagagccaggaagagaagataaatcttaaatctggggctcctggttcaaacttcaggttatgctcgtcttccagtgactctgtaaagtatttgtacgggggtaagcctgatagacgaaggattgttgtcatccagctgtttccaaaaggtatgagaacacagcgctggcccccagatgacaagaacagacccatcagatcctgggaaaagctgggggaaacagcgcatgaatgaattgtgcatttgcacattcaaatgagcagccaagaaaaagatcttgaaccaatcctgccttacccactgtgaatacatcagcaaaaagaactgtgcaaatcaggagttgctttggggaattttgttttatcaatgttatgttaaggaaatgctggcattttttttaaatccaggtgtgagtattctatttcaaatgcagctttctcagagcaaggcctgtctctctccctcagttctttcctcagctttctttccaggctaacctaaacactgctaaccacccccatccctgcaaattagacactcaaagagcctgctatgatagatccaaaaacactgtccactccagcagtgggggaagtttattccttcagttcctcaatgatgacagctcaacttgtcagtcatcctttataacccagtcctgaagcacagaagcttgaaaggtttgactgtgcaaatcagggaatggggtttgggagatagccaggggccaccaccgacttctaggaaagttaccctgcaggaggccatttgtgaatattgatgttagcagaagttatacatccaacctcccatctggatgaaacttccctaaagacaaggagcacttaatatggacagagttatagtattttttacatatttgtgatttgagtaacccaatcaggcctgcaatgatcccacatggttaatctgataatttcgataaatgaaatccttattctctgtaggacacaagcagatttttttctaaatattcctatggacttgagatgatatttgtatcatatgtgctgtgcttagtcactcagttgtgtctgactcttttcgacctcatggactgtagcctgcctggctcctctgtccatggggattctccaggcaggaaaactggagtgggttgccatgccctccactttgtatcttactatatcctaaaaaacagtgccttgcatggtgcctgacacattgtaggcactcaataaatattcactgaattgtgagctatcaggctgcccaggtggctcaggtggtaaagaattcgcctgtcgatgcaggagccgcaggaaacatgggttcaatccctgggtagggacgatctccttggggaggaaatggcaacccactccagtattcttgccaggataatccaatggacagaggaggaacatggagggttacattccacggggatgcaaagagttaaacacacacacacacaaaagcctgagcacacacataagtaagtagtgaactatcacctccctagtcactagggacttttaccttgccaccaaagcttctcaatacaaaggttgagtgagtttgatactgagggcttgtgaaaatgagctaaacaaatgcagacctgcctctaggtctgacctttggcttggctgatcataagctctactccccagcactcctgtccactctggttcattagtgcctcagttttcccattaataaaacaaggtcagctgagctttgccttccagccccttgggcaggttgtttcaagaccctatctgctttttaaggcactcaagagaaatcaaccaggaatgactttggttttgcttgtaatgcagcagtctgttcttcctacacctgagagaaaacagagttgtatcttcaaacattcccaagacttagggaattacactgagcaagcgctgaaattcctcaaactagagacatcatgtcagaagggttcaggacagacatcaggcgttgaggggcaggggtatggagtcagacattaatgataccaagaacacagtcactttttataagaactccctcaaaaacatgaagtatgtaaaacatataaagtctcttttatcctcctccctccactgtactgcagtatcaataaaaaagaaatataaaaatacacctaattttagacaatcctacaagatcctgaagactgtccctctccagaagtgtagtggaataaactgtctctttctcgcatcttgaccaaaaactgaagaatctcagggttgtaagctaaaatacactttattaaaggtaggtgcaaaaacatccagaccgctaacggctaatccagagcaagtttatgactcacagacgatttactggtttaaatgtaagaaaaaaaaaaaaaagttttcaattaacaaccttcccgctttgcgtttgtggttgtttttctctgagaataaaaggcaacagtcaccctgtcacacacagaaacaggcttctaaagcttaactctaaagcaagtagtttctctgtgataagttgagtcactgaaaagcaccctgcagggagaaagatgcctggggcttccatatctaccgttatcaagctgccataaaatggaaaactggagaaaatgaaaagaactctcttaattaaactcggatgcccaaaggccttagggtcagttcaggaacccaagcgggggactcaagctgggctgtcgctgactgcaggctggctctgtgacctcaccgaagccacttaacctttttgtgtcacaacctcatccctgtttcagggaataaaaatcaaccctggctctcccctgaccgtgtaatacagactcattaactattgtttagaaggtacaataaacaatgagcgataagtaaggggggaagccgggaggagagggcgggctgcggagatgggaggacttggggcctgtttgccctgggaaagttctccaggataaaaccaagaggagcctgagtagtgcaaactctggaataagactcagattgaaattccagcttgagccactcaccagctgaattattccacagaagtcctttaaacaatcccaaacctagtccctccctgttgaaagtgaggttgcttggaggattacgtgagataatgcaagaaagaattagcacagtgtccaggtcaggaaaaagagctcaaataaagtttaatcactgttactgcttttaagagccagtagacagtgggatgggcttcccagatcaggcagtggtaaggaacctgcctgctaatgtaggagatgtgtgttcaattcctgggtagggaagatccccctggagcaggaaatggcaaccaactccaatattcttgcctgcaacagcccagaggagcctggtgggctacagtccacggggtctcaaagagtcagacataactgagttactgagcatacacgcacgtagatggtaggacgtaggagaaatcacaaaaaaatatcttctccatggccaccccctttgcagagtaaggtggaccctctatttacctgaactgtcttatggacagattaggagaacgatcatatctaatttttaaaaatctctccaacccactccttcagaacctgcccagcttggaccttgctttagatattccggtacggcctgggttgggagaggaaactgcagacttgtatttagaagtcacggcaaagctgtacatcaggttcagaaagaatatcatgtttgtggtgcctctttggagacaaaaccttaggtcttggcttcgtcacatgttatagttagacggactctcttagagataaagttcagccctgctatctccagaggaaaaaatgactctgagcgaataagtcattctgccaaaggccaaacagttgagaaaagactgtcatttcacagcttgggcgtctccttgggtttatagataccacactgcagggcaagtcactcaccgtcattcggtttggtctgttcccagacacccttgagaaacgaagcaggatacagcatacacaggaacagagagatgctcagactcgatttctggaaatctaacagtctcctctgccctggatgtgttgacttcgggcacgcacgctgcagggtaaccacactagcattccctgcgggagacagcttggcatgggcttaaggagagaaagggtctgggctggctcatcgctggctcatcgctgtctgccgtttctttaggctgtaattacgacccattcagctgcatctgcagccccaacaatgtgggatggatgggcctcatccacagaccaggcgacatttgaaaatccaccagttcagacagcacgtacttctttcgcagcagctcagacttctgctcacacagaaggtggtgaggagctgccaatcaaggctacaggatctgaggttccctctacaccacatttcctttccttgaggtgaactgagcacctgtctaggaattttggccccgtctgggcctgggtcatgcggaatgcaggctaccctggagccgctgggttcatgtagtgtaagtgtgaattctaatgtaaactgtcctaaattggtccctggagaatggagagggacaatggcgtgtgcaaaaatggtggaagaatcagtgttctttgatatcatggctggagcagagaaccaggctcctggtggggagctcagaaccccaggagaacaagatcctgagccccaccaaccagactgcaggtagtttcatctggtggaaggctaagggcccccaatctgatctcatcctgcttttctcttggcttacaaagacaacaccaggcttcagaacagatgttctctgcagttgtagtctgaaccttaaattaagataattttattgtgacatctttccttttctttcccccctttcattgggaaatgccaagtcagttgccccaaaggactaacctttaccaccctagagatgaaggagaggaggtagggtggagaatttcttcattctgttctcgatgctgcaagttaggcagaggaagcaggtggcagtggaacaagactagctctaagaggaaaaggggagatgccaccagaggaagcaggggagggcacctttctgacaacagtgggaggatgggtgagggggaacacagaaaggcaccatcacagcatttctatgtccttgtcattctgggacttaaatctccaagtttccaaaatgaaactgaggcctggtcttgtatctggtaccttgcctgcgttgatttcattgacctgcgtggccaacagtcaaggaataacaatcaaagaaatcaatggtggtcaaagctggaaaaggattcagagcagaaagtcggaagctgcacagaagatgaagatacaatggatggtcaagaggaaaaccaaacacagagggcatttctcagtctttctgagacatgggcactttctttatacaaagaattttccaccccacccccacgaggtgccctctggtgcccagaacaccccaagggaatatttcaatatgtacatctgcctcctacactccctaaagacagcgattagttggtcatcaccgccagtgctcagctcaagacagtaggagctcaataaatgtcaccaattatttaattaacgaacaacttcctaaaatttcaaataccgatctctgaactcaaatatcagtcttcttttttcagtctaaagtgagactcaaagttacccaatgattaagacaaagaggtaaaaaggtgactctttttaactgaaaaggtctttatcaagtttaactcttctgttctcatcgtctgcctctgatgcccttaaaggaaaatattgctaaggtcaccatattcattttatttttcatatgagtattcatggatatagttgtttgtgaaaaaataaatggtgtttggcttaaccacaaaaacaaaccagtcaattttgtcattggtctgaacttatacacagcatactgttcatattatcagaaacagaaattcctgaacttaatttgcatcttttatttcactgattatcttgaaggtaaggttcagagtccctggatccattactcagataagagaatatgtgagatgaacccaattttgtccatctttgtgaggaagaagagctagacacttcatagggagtccagtgtcatccccttcaccttctcaaatttactataatttgtcaggtccccagaaacaatgcattttttaaaaattgtttgaccatactataggcacccccttccagtgagatagggggtgtgttgggaggagatgaggaaggacaagatagggaaagtcaactgagctgttaccacctagcaggtggcataaagacacagagagaacgcctgacctctctggctggctggaccatggcagaggatacctccttgcactaaattagttatgtctcctgatgggtcatgactatgctgtcaaggaaaagcaggctgattttcaaccatagaaatcaaggaaaaaatgggttcggtagggatccaccattgccttttagctaccatgagaattaggaacacacatcattttatatcactttctccaagctaattacacagaattggccccagaaaaaaatgaagtgtgttacatggagaacatcttactagtcaggaaatacaacgttctttgaagctgtcacctataaatatctcactcaggtatctactcctctctttacttcagcaacctccacttcaccacatcactgggttatatataatgaatttataccagtgctcccttagctgatggacttccctggtggctgtctacaatgcgggagacctgcattcgatccctgggttgggaagattccctggagaaggaaatggcaacccactccagtactcttgcctcgacaatcccatggacggaggagcctggtgcaggatactggccacggggtcgcaaagagccagacaaaactgagcgacttcactttcccttagctgatgctgaacctagtagcagagaaagtggaacgcagagcactaattcaagtcccttgttgtttagtctctttttgcatgtgtactgttccccagaacacgtgcacagaatctgagtttcatgaatacacaggaccatatatccataaaaacaaatctagggtatccagtgtcattattcacatttacaatgtaccgagcaccaaatatgccactgatagagctgacagttgaaaaaccacctcaagaagggatatgtcaactcttctctgggatgacagctcccatttaattctctgctcttcagggccaaagagatgacgcctatttaacttacaaagagccagctgggctcactcggcacattgcgtcacccagagtgaaggagtcggaagggagcggatggtcctagtgatgacgcatgaggtggaagagacccggctcacatctctggattggctcctgtacaatgaaagcccttctccctttgccttgatgaagaggggagaggctaagccggtgtgtgtgatgtgcaagaaggcgccatttaatcagtcaggtccgagaagtactttcaagtgttgggggctctgagatgatagggaaggtggagaaggaagaaaagtagaaaccagagaagttattccttaatggaagtgtatttcatcagactgatcagaaacacgtgttttccccagacagggaaaccatcttgaaagacttcatcacacaaaggctttgggtggaagcaagcgccaccagggacccgctggggagggggagggagtagggaggagggagggagcagggaggagggcgtgcagctggttggggagctggcaggggacgtgggaggaaatcgcaaccggcggcgggccggttctcttgtggcaggttcccaggagaggtccctttccaggaattaaaaattctaaataatgttcagaattttgaaaaatcaaaaagattatggactattctttcagggaattccacagccttgaaagagaccagatggctggcaaccaccaacccagacccaggaaagacctagcatccacatacactcccgtttcagtgagcaaacgttttctctccaggagagtatttttttttaattgaatgtgatggagctgaggtgtggaggtaagggacaattccaaacaacccacatggccttgtgcccaaaaaaaccaaagcataaaacataaaccagaagcaatgctataacaaattcaataaagacttaagaaaaaaacgtggtcttcattaaaaaaaaaaaaaaaatatatatatatatatatatcccatacaaagacctgtagtttttttgccaaattagctatcaggctttggttttctaactataaggaatgcatttaatctctaaaagaactgaagaggcatggggtagagtggttaagggcacaagcttggcttcagatggacaagagtttgtgtcagcttggcttttctacagctctcaggcccttggccttagcctcagtctcttcacctgtaaaacaggtgatcacagtacccattgacagagttaatctgaggatggaatgaatttgtgccaagtcatttgcactgtatctaccacagaataagcacccaatgacattttgctgctattattcattaaaaaaaaatcatgatgttgactttggatttggtgaccataaaattttcatggaagttaatccaagagatggggacatggtggtcccatcaaagtcatgaaaagtgaaagtgaagtcgctcagttgcatctgactctttgagaccccatggactgtagcctaccaggctcctccatccataggattttccaggcaagagtactggagtgggttgccatttccttctccaggaattaaagtcatgatatagtattaaaataaatataattttaagtctgagtatgtaaatcacacagatccagacaccaacccctttggatgaaagggggttgatttccattacatagatgtgaaatatgatgctgggagttctaaatgtatggtcacagctatgttacatcctagccatgcagagaggagtaaacaccctctaaagtaatctccttggaatcctgggttctccctgctccaggctgtatgtttgatacccattcagtgatttcatacaaactgagcaaaataagatcccaagcaaatggcctcactatttggcttttgggctggtcaccaagttagcagaatcttacacacacgcttcaagtcatgccctgtgtcttgctgcttgagctctccccaaactagtgcccagtataccactgcattcacttctcagaagtcttttcttgtgttatcccatcttctttctgacagccagaagtttcctaacaacttgtactgtaaacctggacgtctaactatctctgactacgcgtgtttgcgtgctcagttgcgcagtcatgcctaactctttgcaactgcatggactgtaacccgccaggctcctctgtccatgggatttcccatggacaatggtatttcccaatggagtgggttgcaatttcctactccaggggatcttcctaactcaggaatcaaccttcatagcctgccttggcaggcaaattctttaccactgagccatcagggaaggaagcccgactgggctgtactcatgcagatttagttacataattctggacccgtgaagcagcccaccccccacccccacccgagctccgacttgcctcctggaattcagatgaagtgttctatgtgctgtgtcaccacttgtgctgaccagctgaacctaaggaaagacattccaccttgcccctcatgccaccagtcagcagcagcacagattctgctatttaggggcatccgctacataatttgtattctcgcaccgcccgtgcctggcatctggccggcaaaggctggcagcacggaacacacagagtctccttgcgagttgcctgctccatttggcaagatgaacaccgtatcattgggaaagtggacttaattggatttccgagagtgttaagtcatcccacctcagctccaagttgattcaagtgtagccctgccctttccaacaaccagagcaaacaaatgatgaagaaatactttaaaatgcacaaggctgggtcctctcatttactctctctttttttttcttggtgaatttggggaggtttgggcatggatcctgcacacacaatactgttcttgttcttcttttctctacagggcagccctgaatggctctgtctaaaattataagcagggcagccctgggctccaagagatcagagccctcatgctgtgtctgaacaaagaccctgcttttccccaacaattaggcctgcagaaaaggacatctatctgcctctattaaaaccaccacgtgccttcaagtcagcccattgtaaagctaattaaataacacgcctctctccccatgcaggtctcctgattagctttcctctgcccggaatgtctgcaaagtgcctagagatagacagctaatgttccacttctctgactttcccccaacaccgatagctggccttcgaaaaagccacttcgtcactattgtcgggtttgttcaggcgacatgctcatccagagctcacatgtgagttctccagcttaaaggaagagacaaattttatattgctttaaaaataagggacttccccggtgatccagtagttaagactccacacttccacttcacttcagggagcataggttcaaatccttggttggggaactaagatctcctgtgccatgcagccaaaaaaaaaaaaaaagtaatttgggaaaacaacatttctgtcacaatgcagactctttggtggaaatccaccattatcacattctgcaactgctaccccagcagggtaatgttcctgaaggacttttcatagaacttgaggagactggataagacgcagccaggactgtacaagcggccctccagctcagacctgcatgaaacagaagcacagacttcttggaaagacactgtagaggaatgttgatgtatggcagaggccaacacaatactgtaaagcaattatccttcaattaaaaaaaaaaatgttaaaggacactgactgtagagtaaaacagagatataagaaaacatttcaacccattttttaaaaacatgctgtagaaataacaaattccttccaagactctttagtgctaagcagataaaatcaaagcattgcctaaatggctcacattagcgcctgcccatttttcagtcctgcttctctttctttccctactctctgacagccctggacttgctggtatcccttgaacgtgtcccagtgcttcaccgttttacgtgcttttcagacgtttctggaaagccctgctccacccttcccactcacccacctggaaacagcagcaaacatcaccaacaccccacccctaccccctgaagctttcctgggcctctgggataaaaccaggcacttcctcctttgcacctcctaacaaactgccttcaagtcagtgttacaggcttctgattgagtgcttgctacctggcttaaaataacctcagcccaaggacttttctggtggtccagtggttaaaaaccttcctgatagtgtgggggacaagggttccagcctgagttggggaactaggatcccacatactaggcagcaaccaggcctgcgtgtatgccgcaactagaaagcccatgtattgcaacgaaagatgacgcagctaagaccagattcagccgagtaaacaaaacaaataaataaatataatctccacccttctagggcatgagtcatattctattcaaattttaaattccacaaagcttaaaacacagtgacttggacctcttgatatagtaaatgctgcttaataaatgttgaaagaattaaataaatggaggaatggataaaacagccatttggtattaaaagtgatctgagacggtaatggtaaaatcaggcccatttccagcttcaccatagacagccctgcatgcttggaaaagggcattattatcttatgacatggttctctccgtatgaaactgtctagtctaatatgcacacatacacatttttcagacacaaaaatgtttaataataaaatgaaaggagaccagctcttttctaagtctgtttaatagttctagagattaacttttgaaatcagctccagtctttgaggactgtagctcatttaatcatcagaccataccaacctttcattctaagtatttttaagaagactcaccaatcttctcgaatgtcctatacagatgaatggataactaagttataaagcaatcccatatgcaatttaagtttcccatgaaatactcatggacctcaaaattagcaggaaaaaagaaaaaaagcacttggtgaaacagattttgaactctgccaaatccacaaacatttaaaaacagccagtcactgaatgattcccatccttaaaacataaagccttatagcaaaagtcactccctgacggttctcttatgaattcacttccatgcacaatgccatctgcggtcagttcttcccttgtcattttaccatcacgatctcaacttctagaaagttgtgcttttctaatatttgagggtgccttctatatatagagagaaagcaagggataaagacacagagaaagagtccacaatcttataacagtaagtaatcgtatcaacaaaggagtatagaacctccaacctgagacccacggagaaaacactgccattcctttgatagtcactttgttctggcaagcctcctacttgctaaatagaatgcccactttataatgatcataatggattgaaagccataaaattagattctggctagcaatagctctttattactctgctttaccacagtgtgacttccttctcagatcttgccttaaggaagactcatccacaacctctaagacatggataaagtagggtaagaaacaaagacaaatcaacctgcattttcattgtgatctttttcctcaaagtatcattcggtaggactacaaagcagccagttagcgttgagctcactgttattttatcaaggacagattatataaactacatggcaggaataaacggttaaccacaaaaataaatttaaaacatggtagaaagagaagaaatgaaggtagaagagacgaaatgaatgccacatgtatgtacgtgtatgtgctcaggagctctgctgctgctgctgctaagtcgcttcagttgtgtccgactctgtgcgaccccatagacggcagcccaccaggctcccccgtccctgggattctccaggcaagaacactggagtgggttgccatttccttctccaatgcatgaaagtgaaaagtcaaagtgaagtagctcagtcgtgtccaactcttcatgaccccatggactgcagcccaccaggctcctccgtccatgggattgtccaggcaagagtactggagtcgggtgccattgccttctccgctcagcagctcagttgtgtccgactctttctgatcccatggactatagccgacgaagctctgctgtccatggtattttccaggcaagaagactggaattgggttgccatttcctcttccaggggatattcccaacccagggatggaacccatgtctcttgcactggctgacagattctttaccaccagtgtgaatgccatagcattcatcaagtagaactatcagaggaatataatcaatacacttgaatcaaagaataggaacataaaggtaagaaatatgtattgtgaatgaatactctcatgaagacattgggtacaaaaattaagtacagtggagtaaacactgtatgattaaagtcttagcaaatagcatacattatgtgtgacaccaatagcccttttctaaatccaattatggtttggagcaatattagaaagcataatatagacaaagcaagacacacaagaaacctcttattaggagcaggaagagcttggaatggactgtaggagctgttgtgttgatagttcatgtcagtatatttcagttagcaggttatttaagcaatgacttcagggtaagctgccatatgattctgagcaattaggagacacccctttcacactattcacagagtttgggtcattttaaggcctttatgtgccagatctcagaaccaaaattgagttggcatggcttctctcctctgacagaaataacagcaaagtattaccttctgtcagacacaactaagtgactaactttcactttctttcattaccttctgtagcctggaaggtcacttccatcagcacttcccagcacctgtgagaggtgtccaggaggagggaggcatttaggctctcagcacagagcatctgtccagagtatagagactttccaagtttgcatgactctgacccaagtcagcatgcaaaatactgaaggcgcagttgcacattcatgcaactctttttagatgattcctgggtcccaggttactctcctctatcacccagagactcaaatgtggttttctcctgccaggtcttgggttatcatttctcaaatttcttgttcgaccttttatcacttacacatcacaaagcgagtcatcattttcccaccaagaagtatggggtgaaggagggaaggcatagggcagcaaagagaagatgattcaggcattaattcctaccggtgaaagtgaaagtgatagtctctcagtcgtgtccaactctttgtgacccatggtcctacctatccctactcgaaagagaaccaatccaagccgccttgggaggaggacgcagtagggccccaagtgatgtgtctgccggagctcaaggataaaccagagaagtcaggtctggattaaggatgaaggggaaggagaggaaggcatcagttcccttcccatggggacgcaagggtgagggagactgagatgaggaagaggacttctgcgtggacgtctcgcatctcctcgcagctgccgcaggaaaacgtgcgaacggagcagcaataagagcagctagtcacaaaactcatctttctgatacttctccccccagttatatatgttcattgagattttataataacatgttccagtagagacttcatgacaagtagaacatggcattacaaacatacaaagaatacattctgggaaatgttccatcattgtaaagtcacagaccccaaattcttcaccccagacaagtgagcactggaaagaaggatgaaagagaagagggatagggaagaggacatggcaggtgatttcagggcttttgtgtgttgacaccttcaatattacaggcatttttacttcccttggattcacaatggttattccttcaagacacccaaactgaacatatgaattttattaaaagtctttcgtgtggtcaactctgtatgcttgaggtgttttccagacaactgttagtgacttttttttgaaacttatcaaatataaaataccaaaaggatgaaaaaagaaatatggatttcttggcaaacacacttgcattaagttgagatttatacaagtagtacataaaatcatgatgactttttccttaaagagtctgctgaattttttttttcttcttggagttaaaatacactgaagtagcttcaaaattaaatattcggtttgtcttggtttgtttgtaacagagaaggtcaagggaaggtattatattcttagagatgtgaagattgatcatcatttaacataattagactttcagattttgcattcttcacaaattgcacacatagtggttgctttctttttttattcctggttattattatttcacatagcttgcccaagtcccagcacagtgtttaatactaagctacagaatcaggctgacctgagctgaagtctgtaacttagtaatggtgtaactcttggcaagctacttcaactatataaagctcagctttctcgactatgaaatggagctaataataactcagaatattctggtcagatttaaataagataatatatgtaaaatattcaacagcatctggctcaaaataaataataaatggcaatttggggatatttttcaggttaaaaaaatcactttccaaaccagacttagaactcagatatctgcaacccactaagttcactagaaatcaaaaaatactcatttattgcagtgaacaatgttgaatgaccacttaatacaagttattatttatgccatagattaagaagacagttcataaacataagtggcctatgtattttaaaatatctatttataaaagggccaagacaaggaaagaaaagtctttttaacaaataagtgttgggacaataagatatacatatgcaaaagaaaaaattttgatcccttattcacactacatgcaaaaattaactcaaaatgatcctcaatctgaacctaaagagctaaagctacaagattcttacaagaaagcataaatctccacaacattgctttaggcaatgatttcttacatatgacaccaaaagcacaaacaacagtgtaaaaccaaaggaacaaacaaaagagatacattgggctaatcataactaaaaacttttacgctgcataatataacatcaagaacctaaaacagcaactcgtaatagcagagaaaatatttagttccaaatctcacacacacacatacacatggtacagtggtaaagaatctgcctgccaatgcaggagacgcaagagatggtgggttccatccctggatctggaagatccctggagaaggaaatggcaacccattccagtattcttgcctggagaattccatggacagaggagcctgctgggctgcagtccacggggttgcaaagagtcagacatgactgagggactgaacacacacacatgtatggaactaaaatgggcgaaagaactaaacgggtaaatattcaaatagatatttctacaaagaagatatacaaatggttaataagaatatgaacaaatgttcctaatcattaatcattaaggaagcacaaattaaaaccacaatgagatactacttcataacctctgtgagatctatcaaaaagaaagacactaacaaatctaggtgaggatatgtagtgattggaacacgtgctggcagaaatgtcaaatggtgcagccagtttggaaatcggtctgtcagttccacaactagttaaacatcaagttaccatatgaccagcaattccacttctaggcataaacccaagaaaaatgaaaacatgttagcacaaaaacgtacacatgaatgctcatagcaggattatttctaacagatactaagtgcaaacaaatgtccatcaaatgatggacacagaagttgggacatatccatataacagaacggtattcagcgatttaaaaaggatgagttaccgatacatgctacaacatgaatgaaccttgaaaacagtgaaagaatcagtcacaaaagcccccatattgtatgactccgtttataagagaagtccagaaagggcaaacgtataaatacaaaatcaggctagtggctcctagggcatggggctgggtgtgggggagcggggagaagactaggtttgactgttaatgaggacgacattccctttaggaaggacaaaaatgttctagaattaaatcatgacgatggttgcacgacactgtgaatatttttaaaactcttcaactcgtacactctaaatgggtgaattataccatatatgaattatatctcaataaagcttatttcaaaaacaaacaaacaaacaaacaaaacaaaacactgcttttccagaggtgaaacaagacaaacaaaagaaaaaaagaattttcagtcttcacggttgcccagaagagtctgtaaaaatcatcccaagaccgtttgcttaaccaaagttcagtggaaaaacatctaacatttctgtgaccttcttttctaaactttctaagtggcttaaagagaggctgcccgggaaactccgaatggaacctaaaaatattatctcctggttttataaacactggcaacgctaatgaagtgaggagccgcagaccccagggatgggacgtctcactcaggttggaagcccgggtggtgtgtaaactcaccctaagacaggcggatttgggccagggaggtgaacatcaacacggccgaatggaggaaagacgaacaaggaatcaggatacataaagcagagcaggagtggccactgttctaaacatcagtaaaacaacctcttttcaaatcaagctccctgtcccgttctgctgaccaagtttggacaaatgaatgaaactcaagaccagctccccctacccaccttcctttccacacagttttgaaagaggacttggggagccctgctgtgtttatcactccttaccgggtccaaagcagaaatattgtctttatcatccctactctccagggctcacccaactgtgcaggcgtagtcatgtcctccttagctccccaccaaggttctatggatgcttcctgagaaaaaggatgtcactctactttgtggccccaataccctgtgcagaataagaactcactatgtacatgctgacagatgaaggacaggtcaaaagagctctaaccaaggtacagcttcccaggtggcgcagtggtaaagaacctacctgccaatgcaaaagacgcaggagacacaggttcgatccctgggtcgggaagatcccccggaggaagaaatggcaacctactccagcattcttgcctggggaatcccatggacagaggagcatggtgggctacagtccaggtggttacaacaagtaggacatggttgagcatgcacaaccaaggtaaactgagaccctaaaccagcacaatttttaaagagatgggaatagcagaccaccttgccagcctcctgagaagcctgtatgcaggttaagaagcaacagttagaagcagacatggaacaacagaccggttccaaattaggaaaggagtatgtaaaggctatatattgtcaccctgcttatttaacttatatgcagagtacatcatgccaaacgccaggctggatgaagcacaagctggaatcaagattgccagaagaaatatcagcaacctcagataggcagatgataccactctaatggtagaaagtgaagaactaaagaacctcttgatgaaggtaaaagaggagagtgaaaaagctggcttaaaaatcgacattcaaaaaaatgaagatcatagcatccagtcccatcatggaaagggaagacaagttagggactgcaatgtacttatgatggtctctataataccgggactcaactctggggcctgaaggcattgacagtaatcgtaagagaagatgggatagatacaggagctgtttagaaaataaagtggacagacctgtgactaacctaaatctgagggaataaacggtcatctcttgagaggttcctcctcttctgccagtacaggatcccttgggagggagagggggaggagagagaggaagaagggagtcagggagaggagagagaggaggagaaaggggatgaattgacaaggtgacttgatttcttagagttccacaggctgactctactaccggacttctcagttctataactcaatgaatcacctactaaaattaagccagttgagccaggtttctgctacttgcaaacaaaaagagccttgaaagcaactaaaacagcacagattctctcttgcctttccagcaggtctttcaatctgttacagcgaggaaagaatgcttaacgttcatctgcccattctgtccagtatccttgcctggagaatcccagggacagaggagcctggtgggctgccatctatgggatcgcacagagtcagacatgacttgaagcgacttagcggcggcagcagcagcccattctgtcacagacactgggaacttgagaaaggaagagagctaactgatcgaaatgggagaacttcagaatcacatttcaaactttgtatcctttgcccccaaatcttgggggttctcacgccagcacgcctaatagttgcagttagtcactcagttgtatccgactctttgcaacccctggactgtagcccaccaggctcctgagtccatgaaattctccaggcaaaagcactggagtgggttgccatgctagcacgtctacccttagtccaatgtttgcttcaccagctgaagcagaagcaaaagattagtctcgaagtcaatagatttattttcctatccaacctgctctttccctttggacagtgtccttaaacattcccttgaaattctcttaaaaggcttaaaatttttgtcttctgtgatagaagcagaagtataataaaaaacaaaaattacgtagactacttctgaaatatcttgaaaggtatttgaagggagaagcaattcgcaaagtcctttaataatggatttcagagttaaatttcaccatggctaatctaaatccctccttttcccatttttgttcttttttttcttgatcttcagtggatctaaagaacagctggtaactcctcagtgatactttaagaagagttaaggctacactagtatttaatcttagttgcttttatacttagttgcaactcattgcttacctgaagcctgatgtctatggaaggcaatgaagaggccatttggcaggaaatgttattcaagcagggggagatgagtagataccccatggagcactttatgttctagcaacagtaaggtcaaatatgtcctaaatgtggaacttgccttcagtgttacaagaaagctgctttctttgtgtcttttacaacttaaagtttctaaatcctccttgatacaaaaataggtagagggcaaaacaaggttccttccatgccattaaaaacttgtgagatcaggaaggaattttgaaagggcagatggaaaagtgattaattgttactaaaaaaactagacggaatttccctcctccagagcccagcaagtagggctgggagatgaggtggccctggggaaatgtggatggatgtagggaggctggaggcctggtcccagggcccctcacccctgcctttcccagtcctgcttggagacatttcaatcccattcttctcccaggctctccctctcagctcctcagcagcagtcccacatcacattgagtttaaaataaagaaatgcttttcctaaagaatccgcacacaaataatctcattaccccagtgctgaggtttatacagcagacgtcttctgccgggggcggggggggggggggggggggggggatgcactctccgctcactcacatggaacagctgtgaggagagaaatggtatttaattcattgtgaaatattcaacaatggcttcactgcacttttaaaagccttttgatagtaaaatcccacagagaacagcccatcctgtgtgctgaaaagcagcctccccacaattagtccctctattcagcggtcggagagtctgtgtaaacttcagcacgtgctacccacaccgtggagagcttcaaggggataaacctttcaggaacttctcagggtagagtcaggttcagtgactcgggttggtggagaagcgggaaggggcatgaggatggccaaactttggtgacagaccctaagcgaatgccagagaaagacaccgtcctccacggcagctttacgaatggccttgcccttccgtgcccttgaggaaccagtgctggaccaaaagaaaccagacagaagggt

SEQ ID NO: 210 - DNA, 30483 bp, Hippotragus leucophaeus
  source 1..30483: mol_type = genomic DNA
aaagtttctaaatcctccttgatacaaaaataggtagagggcaaaacaaggttccttccatgccattaaaaacttgtgagatcaggaaggaattttgaaagggcagatggaaaagtgattaattgttactaaaaaaactagacggaatttccctcctccagagcccagcaagtagggctgggagatgaggtggccctggggaaatgtggatggatgtagggaggctggaggcctggtcccagggcccctcacccctgcctttcccagtcctgcttggagacatttcaatcccattcttctcccaggctctccctctcagctcctcagcagcagtcccacatcacattgagtttaaaataaagaaatgcttttcctaaagaatccgcacacaaataatctcattaccccagtgctgaggtttatacagcagacgtcttctgccgggggcggggggggggggggggggggggggatgcactctccgctcactcacatggaacagctgtgaggagagaaatggtatttaattcattgtgaaatattcaacaatggcttcactgcacttttaaaagccttttgatagtaaaatcccacagagaacagcccatcctgtgtgctgaaaagcagcctccccacaattagtccctctattcagcggtcggagagtctgtgtaaacttcagcacgtgctacccacaccgtggagagcttcaaggggataaacctttcaggaacttctcagggtagagtcaggttcagtgactcgggttggtggagaagcgggaaggggcatgaggatggccaaactttggtgacagaccctaagcgaatgccagagaaagacaccgtcctccacggcagctttacgaatggccttgcccttccgtgcccttgaggaaccagtgctggaccaaaagaaaccagacagaagggtccaaaaggtagactgcagacgtacatttcctccggcaaggtttttaggagtttccagtttgcggggaagctaggaaagcgtatattatctcacagggtggacatcagccaccaggactgaggtgacaatgaagaaatgtttggggacttgcctggtggtctagtggttaagaatccaccttccataatccacctgccaatccaggagtgagtgttcgctcagtcgtgtccgacccttttcggaccccatggactgtatcccgccaggctcctctgtccatgggattctccaggcaagaacactgtgagtgggttgccatttccttctccaggggatcttcccaacccagggaccaaacctgggtctcccatattgcagggagattcttcaccacgggagccaccagggaagccagtccaggagactcgggttggatccctggtctgggaagatcccacaggctatggagcaactttgcccatgtgccacgactactgaagcctgagcacctagaagctgtgctccacaacaagagaagccaccgcaatgagacgcctgcccatcagtactagagagcagccttcactcgctgccactagagaaagcccacacagcaacgaaaacccggcacagacatagatagataaatatccgtaattgaaaaaaatattaggcaacaaagtttgtatcatggttaaaagcatgggctttggaggaagatctcagttgaactgaccctcttccaacctcccagaagcacagttagacttattgagggaagtgacttgacctctctgagcctcattcatctgcaaaataggaataatattgccagaaatattgtaagagtcaaaaagaccacacatgtgtgatcctaagcagacagaaagtacttaatgaatggcaattattctacctctcaaattggtctagaaagaaggcaggtcttttcctggatgtcctgttgttgttcaggccctcagttgtgtccgactctttgagagcccatgggctgcagcacaccaggcttccctgtccttcaccatctcctggagcctacccaaactcatgcccatcaagttggggatgccatccaaccatctcatcctctgttgtccccttctcctcctgccttcaatctttcccagcatcagggtcttttcaaatgagtgggctcttcacaacaggtggccaaagcataggagcttgggcttcagcatcagtcccttcaaagaatactcaggattgattttctttaggatggactggttggatctccttgcagtctaagggactctcaagagtcttctccaacaccacagttcaaaagcatcaattcttcggtgctcagccttctttatggcccaattttcacatggaccttacatgactactggaaaaactatagctttgactatacggacctttgtaggcaaagtaatgtctctgctttttaatatactgtctaggtttgtcattgttggacttcctccaataagattatttgaaattgaagcagaatgagacaggaactatttttactcttcattctaaattttttaattgatcagcagaaaagcaacaaggaagagagataagcatagatatctcattgaaaaatctgagggatctggaccatgttgaaaacaaaacaatacaaaaatatcactaaatgtcaaccaaactttgcatcatggtaggttgattttgctgttcaggtattttaattgttcaaagcacataatactgatgaaatgtctatttcacaacaacttttctattatttccagccttgtctcaacagaccaggaacaggatacaggcagttcagcccctttcattataaaacccaatgttcagtctatcagcgggatgcagactgtctgtcagtcctgcttggtgaaaaatgtccatctgggctgaccagcaaggaaaccccgagctgtctcagctgctccaagttggtgaccagggtggggcaatcggagaccctgaaagtggtctccacttgtctaagttagtttgtggcagcagatgtaatagccaatggttccaccagaaggcaaagaacaaattagggtgaagatgccaaagggcaggcaggatcggaggcagtgactgaggagtgaaggacctctatgtgccatcctagtttctgtatctgttgtgggataaggtgttggctcaggatttccaccccctttcagaggccccgttcctccagctcatttttacccactgcatgagacagcgatgccgagaaaatctcccacgcactggctagtccttgagaaacagatcagagtgtgacgcccctacggagtcatcctaagggctctgacctatcccatctgcagctcccaggagagaccacaggtcctacttcatgggtacttagaaagatcactctaaggagcatgtagtaaaaggggaatgtttaaaaggaaacaggagagaagtggctggaattcaggcatagcatccatgcccagtgttttcaagaccacaggatagaaaccatttccagatttaaagacagtctcttgggactgaccagagtggtgagaaggggttgataggaaggaagctttagcagggaattcaagtgagttcaacaaagtgtgcttggcacacttgccaagtacaacaaggtaagtgctgctggggctacaaaggtaccttttcccttggcaattcttaacctccccagggaggtcagatcacttttgagaatccaagaaaagctacagacccttagaaacacccttgcatgcaacttcagagggacctcatgtttctgagtcatcggcagcaagcacccttgctctatgagactctgcaggcttaagactcagtgtaagttgttaggactgattttttttaaaaagcatgtatgaagcgggtaagaaatcacacaacagctgcaaaggcaactagaatcctggttctgtagatattgaaaatcactgcctctgtctctcaaggtttagtttagcaactctgaggaggtacaggaaagacccgtaggacaatctcaggcactgggagttttgaattttgtttttttaatgtcaccttcaaggatgaacacaaattctaaaaatctgcaaggaagtccaaaagagtcaaacaggtggtgaatgactctaactggagctgttggggaacccagtggggaaggcactggccactcctcattctcacagtgatggggtggagggatcggtcagctcactgggccactgtaggcgggcagagaccgaaccagagcggatgggcctgttccacgggcagcctgagagagagccaaaggttgccctctacatcagtgggaaggtaatttctctcagagtgcaattaggtctcatgtttgacctatgacctctggcccatgagatatttacgatctccagacagccagcctagggggcaagtgagtgaagatggaagctgaaggcatttaataggaggagggagggggcaagtgagtgaagatggaagttgaaggcatttaataggaggagagggagagagaaaggaaagaaagtgggagggaggaaggccttggtcagtctgaagtcatctatgaaatcatgaattgacagccttgcttcggtgcgcatcatgtctgccttcaatacggttttctgttccccaccattattctattacatatgaggacactgaggctcagaaggggtcagtggcccgggtcgcacagctggtaggtggccaggctagaacctgggcccaggccagtctcaactcccttgttcatttcccaaccgaatcagtgcgcacgtgcactccacagatggttcgcccccttacccatcccgccatctagaactccctccagcctcttgcaaaactgaatctacgcccacaatctcttctgttccaacggtctctcagggcagtcgtgcttcccccgatcaaacgcagtggccgaggccgcgcgctcttctcctctccgttcccggagccgtcttgcagcatgtcccgacgccctgcctccctccgggcggattctgcgtgcgcccgccttgctggcagcgccggggttaacccaccggcctgcggagcaatgatttctgttttatttcagcaggggaagtgtgtgccggcctgattagcctgatggtttcctcttttcccataacctccagacccccacggcccaagtgtttactctctgaaataaaaaatctgctggtgtttttctttttgtgtgctcgtgtattttgggaggattgcacaggaggaaggcggggtggggggttgagggacgcggaggcgggggcggtggggaggggcgcctcccctcgtccctgccccccagcgtgcctctcccagctgcagccttaagctgagacccctggccacagcgcaggaaagaaacttattaatgaaggagctgggtctcttgcttcagcagctataaacacagcgaacatctggagagtaagtctccaggcggccagacgctgagaacaacaggctgcctccgcgcatccctcccccgcccggtcccctccccccgccggcctgcagcccccgcacattcacccaccagcacttcattcaccgagggcggcggggtggggagaggagggctgacgccaggcggcctccaccggggtccccagcccccgctccccccaccgagttcccgaagaggggtcagacagcttgaatccaataagaactccgtgccccagggaccttttcccaactcggaccaaatatttgtggtttgaaaaagttaagagaacttttttctccccagccccctgggactcccagtgaaatgctgttacttcctaggatttttgagaagaggccttggaggactgccaaagagcgcacgcatccccgttgtaattcactaaccccggcccaggtttctcccactcggttcccttcccttcagaggaactgcaggggtgttttacatttcggaaggtctttacagtccttcctgccatgggctgctggactctctggcacgtagcttctctttctggtcctcaccaggctgccttctcatttctctgtaaactgggacacaagggaaggaaaaattggcaggtgtcagaaaaccagtctggggctggatgaatgtgggcaagactcaggacttaagggtcgggcaccaggtcacttaaattcacattgagattgtggtgtaaggaaaaggtagcgtctgttgatcacatactatgacacttcttgaagtagaaatatagcactctacataatagcacaagactgttctaaatgagtgtaatgatcggacctgttaaaggttagagaacaagatcccaggtgtattcttgctcttgccaccaagccccctaacccaggggtcccaaactctgggatctaatgcttgaagatctgaggtggagctgatgtagtattaatagaaataaagtgcacacaaaaaagtgtaatgcgtttcaatcatcctgaaaccatcccccaacccccagtagaaggaaaaattgtctttcaagaaactggtccctagtgccagaaggttggggacagctgccctaaccctttgttaggactcaatacctttccgcttatactcaaaaccttaaactgaaagtgatggtactctgaatatgatacagcacaagctggaagagctaccaaggtgatgaggttgggggtgaataagatggatgggacaatgtaacactggcaaataggagcaaattcaatccatagccagataaatacctttcacttatggagaagaggttcaggcctgggtaaaaaactcatgatcagaagagcaaagtgatagagccagagtgcaggctagtttttgcatatggatgctcttcctaattcactcctagctggaggcagtcctgctgctctttccccaagcctctcctagccatttttggtcctctcagagatgggatgcaggtggggaggtttcctgcatcaagcttctggcagtgctattccctggaagcagtttgtccggcagcttggccccaactgtagccccttccgtgaaaggctaaaacctgagtcaggcttacagcttccctcttccagacacaactaccaagtaggattctgaggtcaaaattttccctgagaggaatggtccatattactacatcccagacaaatgtacgcatgcacacccacacacacaggatcagaactgttttgaagaacaaagaacctagaacagctcctttcaaaaaaaacataccctgaatgaggaaagaacagatatgtgcagcagatagagtttaaaatatcatttttttaaaccacagggccatctgagatgatcagctgaaagaacaagactgctaggagaagaaacatttcagagcaaggtgaatctccatttaacaagtctctctggcattccctcgatattctcaacacttaaaagccaagtcagaggcatctgtttttcctgctgaaacttcccacctggttgtcgatagccctttccaaacactggtccaggtttgatctttcccagccgcctggccgtctggctcgggagggactgtgaactcagactttcagtacagtctcccacttgaacttccaaagtttatttgggaaagacactcttttattcaacccttttgctagtaaatgtattttagaaattttaaatactgtggcaagattcaaagtcacacacttaatggttaacctttatctcataaatgtgatatttcatctaggggtcatttcttcacatcacataaatgtagtctcatatacaaatttggataaaagttgctaagagacaaggcatgagtcttcccctctctctcttctcagtttccagggcatggcactggctaccaaaaatgtgcatcccatcactgggtcactttctgactcaacaatacccacacttttctggatgcttgggcacttcaggacaaagagttacagtggcaaacattcatatcgtgcttgcttagtgacggcactgctttactcttgtcatatattaacttggtggttctcaaagtgtagtcttcagaccggtaacagccgtagcaccacctgaaactttgagagaaatgcaaattttgagccctaccctagactcactgaatcagaaaccctagggatagaacccccacaacctgcattttaacaagccctccggtgactctgaaacactttgaaaacactggtttagatgagaaagtggaaatataaaataagctgtctgaggcaacacatttaggaagggctgatgggcagatccaagcaatccggttctagaggttggagtcttcacctctctcctcaagaatgagaaataagactgggtagatgaggtttttactatgatccaggaccaaaaacattgcaaattgcatgatccaaaaagaaaaacaaaagcattgtctcttatcaaatcaaagaccacggtaatgaggccataggtccattcccatgagggtaagctaggtttactgtgttctgaacctgcagatgctttccaactcaaaacaactattttgcaaaagtgaactttggtcaaagaacacctgtgtaagtttagctgattcaagacagacccatccctgaaatgaaaaatgctttgataatatgtcactctgaaagtgtgtcacagtttctgatacacattattatcattcacggtcatcagagctatgaggttcaagtcaaacatggacagctatcagcggatgggagggaccgcggtcgtgtggcctgggtgctcagttgggtctctgatgtcactattctggttcccagtggaaaacaggcattgcatgactccagctgggtctgggcaccactctgagctcactgtctgtgtctaaaaatagtttgccatttctactccatcccttccatggggccatggatgggagctggtcatgacagtaagaggcagtgaagtgttagtgagttctcagcgacggggaacaagagactgacatttacaaaaatgcttcttgctacgatgattgagagaaagggctgagctggggggacaacatagaagaagggaacagagggaaggcagagccagtgggctccactccagtcagactataaacagcaacagacatttcagccgtgtctcgtgtaaggggctccattgattcaccaggctccccaacagagggatgaagagaggctaagatagaaagagcccattcattcatgcagaaccccactctctgtccccattggctgtcgctaatggcttcaggctgatgggaaggagggggggaagaggcgagcgggaggaggaggtagaaatgaaagaaaatgatgactacaagattgtcatgaagagatgtacagctgcacaggcaattgcatgcaaatgtggcttccctttttagctgtagagttaatgtcctcagattcatctttttctctttcatgccatctgcccctccccttcttttcccttcccattcatctttcagtctcctgtcctagagttcctctgtctctctactaacacccacttttctatttccacacacctcttctttcttcccctttcaccagctcttctgtccaactaatttgtgactagtctggattgctgagcattctgttcccatcacctgataacctctcccctgctcacattttctctcagctttattctctccccctcctccctccctccactcttctcctccctctgggcctcagtcccttcggggaataggaacaacattcagaggaaggaccctcatgggtcctcgatggcccctcctgccgggcagcccaggcactgacagatgcgtagtcctggcagaagaagagcctacatcccttctcagagcacgaatgtgaaatggaagcagggttggggagtggctaggaggacgggaaggaaactgaagttataaataggataaaagaagatgaaaaaaaatggagagtatttttctctctctttttttcttagtcaacacatctccaaggaaatgtgctgcagctggagaaatcgactgctccatgtcttcatctcccttccctgtaaccccaagatctccttccaaaggacacctatcactgaggagggctggaccactgcccagaaataatcactgcaaccccttcctttatctggacagctcagaaggcaaaggaggggctgggaaggctcaggggttctgccagatatttccatcggaagaagcctaggatacagggaactacagatatcatgttcgccaccaaagcaccactgcctcatagaagcgggctagagtttccaagctgcagttggagacaatccaggtcattttaggattggttatcatatgcccttatcttcccatcctacccaagagtcaccagtctaggtgactccagcttccttcttaaaaaggtagactgtggaaagtagcttctacacgactgtcagtcctagcatttttaaaacaacttccccctaagcaacctaaatgtccatcaacagggaatggattaagaagatgtggcacagatatacaacggagtattactccgccatttgttgtccagtttctcagtcatgtccgagacccctggtctgcagcaggccaggcttccctgtccttcactatctcctagagtttgttccaactcatgtccattgagtcgatgatgccattcaaccgtttcatcctctgtcactctcttctcctccagtcttcaatccttcttagcatcagggtcttttgcaatgactcttagccattaaaaagaacccttatggcagaaagtgaagagctaaaaagcctcttgatgaaagtgaaagaggagagcgaaaaagttggcttaaagctcaacattcagaaaacgaagatcatggcatctggtcccatcacttcatgggaaatagatggggaaacagtggaaacagtgtcagactttattttggggggctccaaaatcactgcagatggtgactgcagccatgaaattaaaagatgcttactccttggaagaaaagttatgaccaacctagatagcatattcaaaagcagagacattactttgccaactaaggtccatctagtcaaggctatggtttttcctgtggtcatgtatggatgtgaaagttggactgtgaagaaggctgagcgctgaagaattgatgcatttgaactgtggtgttggagaagacttttgcgagtcccttggactgcaaggagatccaaccagtccattctgaaggagatcagccctgggatttctttggaaggaatgatgctgaagctgaagctccagtactttggatacctcatgcgaagagttgactcattggaaaagactctgatgctgggagggattgggggcaggaagagaaggagacgaccgaggatgagatggctggatggcatcacggactcaacggacatgagtctgagtgaactccgggagctggtgatggacagggaggcctggagtgctgcgattcatggggtcgcaaagagttggacacgactgagcgactgaaatgaactgaactgaactgaatgtcatttgaacaacatgggtggacctagagattgtcatactgagtgaagtcagacagagaaagagaagtatcatatggcatcccttatatgtgggatttaaaaagaaatgagataaatgaacttacaaaagaggctcacacacttagagaaggaatttacagttgtcagggggaagaatgggggtaagggataagttaggggtttaggatggacatgtacacactgttgtatttaaaatggatagccaacaaagacctacagtatagcacagataagtctgctcaataatatatggcagcctgaataggagggaagtttgggggagaatggatacatgtgtatgcatggctgagtcccttcactgttcaactgaaatagcaaagcattgttgaattggctaaaccccaatacaaaataaaaagttaaaaaaaataaaataaagaagcttcctcctgagattcttaaaaatcttcacagacattatctcattggccctgaagtaaaaactcttacctttgagaaacttgacaaggaggagactgaaaaatcatcttcacttatttatgtacttcttagctaagaaaaagatgggctgtgtatttttttgatgaaaatgaggtattctgattttaagctacaagtgagtgtggagatgacctcagctactaagaagatgtattaagtaaatgtaataaactataaattggtagcacgtagaagcaccatccaaagctgaaagcattaaagcaaggcagctttaatctctgttgcatagggagatataagacttcaaagcctagtggtgtgaataggattgaagaattatacaaatatagaccaaaccatttcgatcttttgcttacacaaacaaaatctttttctttttttttttttggtttagatgtttaaaggatcactttttctcatctcttaaaacgttaagtccttaagtctaacctgtgaacaactataaaatcctctgtgccgcctcatgaaatgggtgaatagccaagacctgtgtttatccttggggggaactgagatgccaagcagaaagtgatgacacaaatgctatcctgtctgagatccgaggtagtgccaaagaacacctccaagatcaagggttgctgagtcaagacagggaacacaggggcaacttcatcccacccaggagaggaacctggcaactgcagaccagctcccatccttctcagcccccatcaagggttcccacctctcattctgtgtctgtctgtgtatttcaggtgaaagatacaatgtaggcaacaaaacaaacatttcctttatttctccacttttataaaaataacttgccatacaacagtaaagagatatggaacaaaaaaagttgcatttaagttagtttccagtggcttttcacctatgcacttcatcagaatagaggatgaaaaatctgtctgcaataccgaagacacaggagacataggttctatccctgggttaggaagatcccctggaggaggaagtcacaaaacctactccagtattcttgcccgaaaaatcccatggacagaggtacctggcgggctacagtccaaaggatcgcgaggagtcggacacgactgaagcgacttagcagagcactaaatacatacacacaacatgtaagcatcatgaaatttcttatgctaagaattcgtcctgggagaaaacaaatgcagctttttggtatctggatatattaccataacctgatctcctgaaaaattgaacttactgtcaggaccaatcatttcaggatccctaaattaaggttttacattttgtatcaaaaataaacaaaaaagttagcaggttagcaaggaccaatggaatttgggagaaacacaatgattccggcacaatagcactggggtatggactttgaacttgtctgctccttgggagagtggatcctgttcaccagagggcagcagtgtgagcagcaagtcaggactgaaaggaattctgaggagaggagctcctacgaggaagagttgaggagagaggcagcagatgaggagaaagaagccaaatgcagagcagggcagaacggaagaggatgatggaaagagaagacaaatgaaagaaattacatcgtgtaagaagaagattgactacagagaacaaacatatggacaccaaggagggaaaggagggcgggataaatttggtgactgggaccgatatatatatacacactgttgatactatgcatgaaatagatagctcaggtggtgaagaatgcctgcgatgcaggagatcctggttccattcctgggttgggaagatctgctggagaagggaacccacgccagtattctggctggcagaattccatggactgtatagaattccatggagacataaagagttggagacgactgagcaacttccactttcacttcacttcatgaaataagtaactaacaagaacctgctctataacttaggggattctacacagtgctctgtggtaacctaaatgggaaggaaattcaaaaaggaggggatatgcgtatatatatggctgattgacgttgccatatgatcgggcttcccacgtggcactggtggtaaagaatccacctgccaatgtagctggattcctgggttgggaatatcccctggaggagggcatagtcaccactcgagtattcttgcctgaagaatcccagggacagaggagcctggtgggctacagtccataggtcacaaagagttggacacaacttagcacgtgcacacacacacacacacaccacacacacacagaaactaacacaatactgaaataaccatgctccaataaaaattaaaacaacaacaaaggctgactagtccacacaccctctgtccatccggttcacacttcataattaaaaaccttctaggtcctttgttaacagccaggttttaggggttaaaactccagacaggcaaagtggagagaactatatacaaaatgaagatgtaagtgaagaaacctcacgtgggccctttcctagagtttagtctttctgtcactggagaataaagtcactcaaaatgactgaaaagttctgggacttcccatagaacaagaacatccagcacccacataagccagggccaccgtgatgacaactgatgcaggatgcagcccgcatccagttgccttgggccctcaactccatcctcagtctcagcctccacgtatgttcctacctgagccatagtgttcaaggccggtgggcacttcctgagtagctgtctcttcccagaacgggcagcaagctctcggtggatgatagaccgactggaaaccacaggccatgcgggggtcttcgtaagagttgagaggtccctgcctctgtggccaggaaacaaaaggaaatatattaagattccctaatggaacagtaactatcatccataaggaagaattattcatagataacaaaagactattttttaaactaacttttattggagtatagttgctttacaatgttgcattagcttctattgtacaccaaaatgaatccggcctatgtatacatatattcccttcccttttgtatttccttttcattcaggtcaccacagagcacttagtagagttccctgtgcaatacactatgtagaaccaaatattgatcactatccttccccatctgaaaaaaaaaaaaaaagacaggaatgggaaaggtttctgacttggactgctgctgctgctgctaagtcacgtcagtcgtgtccgactctgtgtgaccccatagacggcagcccaccaggctcccccgtccctgggattctccaggcaagaacactggagtgggttgccatttccttctccagtgcaagaaagtgaaaagtgaaagtgaagtcactcagtcgtgtccgactcttcctcaccccatggactgcacccttccaggcttctccacccatgggattttccaggcaagagtactggagtggggtgccattgccttctccatgacttggactatgtatacattattttcatgcatttcctcaaccatttgaagaatttttaaaattttcaaataaagatccatggtaattgcaaggcagaaccttggtcatctttatataatcctggcttttgtcttttattttttttaatgttaccttagtctataaaaacaccatgaaagatattcttataagacattgcagtatcccagaaccaataggtgacaaacaccaaagaaagacacaaaaaatgtatttacctaataaaattgctcttttttagttaatcaatgtgcacaagttttctttctttgtaaaatatttgtttatttggctgtgtcaggtcttagttgaggcacatgggattttccattgctgtgcacaggcttctctggctgcagcacatggacccatgtgggatcttgtttccccgaccagggacttgaacctgcatcccccgcattggaaggcagatccttaaccactaggaagttccgtgcctaagttttaatgatattgatagctagattagaatgttcatttttcccatttgggcacttgttcagttctcttattagtttttgtaaaatccataaaatatactctctacccagtactctctaagaaggattaatacagtatgtaggagaccatggtttgcagtgcttacggccccattctttgaagccagggatacatggattcaaatcctggctccatcacttactaacagggacctaggcctgttcttttatctaaacctcagtttactcaactaaaagatgggaaaaataataccttcctcataagataggaagagtgaatgaaataatacgtgtaagaaaacaatactggataaagtttactccagggctgttcttcttccaagtgggttaaaggtgctgagaatggagtaagaccctgggactgaatgggttcacaccgacttgctatatgtgtgggtgctaagtcgcttcagtcgtgttcgactctttgtgaccctgtggactgtagcccaccaggctcctctgtccatggggattctccaggctagaatactggatttgtaggcaggttctttaccactaacaccacctgagaagctccaagttactgtatatcaaaggctcatgtccttggcttctgttaccaggcagctcttgtgagagccacgtgaatataaacagagaaatggagtgtgggaccaagattgaggaaaatcatcagcaagaacactcaactgagcttccagtcagcaaaaaccattttgctgacatcgtattttaacactgcaagctcttgcagcaactacagtaaggttttcttttgaaccccaaggataagcaggtcttcaacaattctttacaagagaatcaacttgaagtacattttctaaatgagctgtgtgttctcgaaatccatccccattttttcatatttctctagagtccttctcaaaattcagtttcaagtatcagagttttggaaacagggtctgggtggggaaatcgtgtcactaagtggtataagggaggactctaagtgacctggccctgtcctctttaggggcagcatgtgcatggtttgcctaaccagaaagtccttgtaagaaggcagtgggtggttccagtaggatctttgtagagaggctctgggtggtttggtccaggccctgctaaagtggtgggaacaagaagagaacttggactcaagggtcaaagttaaggttttctctgctaaggaaagaccccagaaggtgaggcatggtttgcaaagaggcattgaaggaaaacgatgagtgccctatagagggaagatggagggcagggataggtggcgagttatgggtaagcaagacgatattgggttctagacctgggccatcaccacgtggctgtatggtgagtcagcctgcagccttgacaaacaacgacgtacagcagctccttgagttttgtgattggctttatttttagtggagtgcctcctgcccccacaccaggttccttgttgtcagggagggttcatttattatttgatacaggaaagtctatttttaagatatatttcctccttaactgtcctcagcggtgccaggggaccctatttttaagaacgagaaggaggtaatgcatcaaacctaccatgaaccacaaacatctttgctcacagagactcctgggagcatcatgacacttgttacctagacacctgcctttttgtttgatatttcacaaactgacttaatacctatttcatagagtatgagaatgacatttttactcaagagaaccacagacccagttccaattcattgtgaaaccttctcagttgaggagaaataagcaggttatcaacaggtcagaaatctgggcagcaaagcctcacttccatgcttgaaaaagggcatcacctgaaacaagttcaagtacacaccttcctcctggctcctggtgaatggaggtgagttcaggagatgccagccaccctcccaaccctgtcatagtttagagaacccatgtgatgggtcctcagtcattcatcccacaagtgattactgaaaggaactaatgtaggtcccacactgctccatgctgatcagtgagctaaacacggtgaagagaacagtcacaattaaccctcatagctgtgcaagattcacgtttttgtctccatttcacggaaggaaaaaactgaggttcttcagagagcaagtaaacattcaaaggccacacagctagtaaaataatggagatagaattccctggtggtccagtgctaagactctgtgccccctctgcctggggtccggattcgatgctacgacaaaaatcgaaaatccaatgtgtcggaactaagacccggcacacccaaataaataaataaacagactttttttttttaagagagagttctagctgagacctacttgatttcaggctgtgcgccgtgaatcttctgtggcctgggtggctcgggaagggaggccgctgtcccatgacaaagtactaaatggattatgacaatggatggtcatgaaacaaatctgtatcacacaaccagtctatgccaagtattatgttagatgctaagaatgaagtatgagcaagacatgaactttaccctctgaagtgcacaaaccagtaaacaggaaattacagtgaggggatgtaacagagtgaagcaccgatgtgtacgggcgaggagagtggcagcaggtaagactcctggaggaagcagactaaggtaataactgaaaagtcaagtaagacttagcctagactatttggtgaagggtctagagaacaaaagataacattcctaaaagtggcaaggaacacctacacctatgtaaggaagagtaagaaagactcagaatggtgacagagagaaagacgtggtagtgagaagtaagaggggaaagcatgctcttggcaatgaggatcctgcaatggagggcagttagtaacaatgaaagctggagggacagagttgagggtcatgaaaaccagaccagaatctggctgcaggaggtgttaaaggtagtggcatgctgagtcaagatgttctagaaggacacatttgatagggctaagtaggacggagtgagcaggagcaggcgaggaggctgacaaggcagcagctgtgccctgcagagccatactggggcctcggtacaaaggaagaaatcagtattactgatcctaactgtatttaagttttttatttcttataataatttttgcattcattttgatggtcagaaatattatattcagggaatattaatcagagagagagctatctcagaggtccacagctcagcaccaaacctggctctacccaactgcctgctgattccatggctgaaaacctcaggccaaacaaatagtgagacaagaacacagtcccacccagaaaaaaaaaaaaaagaaatattacagtcagatttgtttagcttgagtaccgagtccgggggcagcccttaggctttggccccatgtgaactgagtggtaagccagttatacagtcaaatgctctatcactgatctccacccccaacagtacagttatgaagagttgaactagggtcatgagtgtagaggtgaagaggaaacaagaaatagaagatacgttttgaagaaagagtcaacatgattttatgactcagaggaggtaaagaaaagcggtgaggggcaacgatccaaaaaaatgcttaaattgcttgcttctataatagggaaaatggtgaataggttagaggttggaagaaaatttcactcttggttgtgctcagatggagagacggcagagcgactagggggaggttcccttggtggctgcatgacggaacacaggaaaggacagaggtgtatctataatcatcaaggatctagttaaagtttagagtcagggaaaatggaaggtaaaataaaaaagagaaagggtcagaattggctctgccacaccagccagcagtactatttctgtgtacctatccaaagaaaacaaaaacactcatctgaaaagatatgtacatcccaatgtttactaccacagtatttacaataaccaagatatgaaagcaacttaactgcacactgatggatgaatggctaagaattatacacacacacacacatatacatacactggagtattattcagtcatagaaaaagaatggaatcttgccatttgcaacaacaggaatggacccaaaggatatttgctgactgcaacaaatcagacagagaaatataaatactgtgtgattctacttatatgtgggatctggaaaaagaaatgatacacaacaaataagcagtaacagaacagagactcacagatgcagaaaacaaactggtggtcaccagaggggcgcgagagatgggtgagataagtgaaggggactcagagcaattatcagataacaagtcaggagaatgtaaagtgcagccaagggaatacagtccacaacattataatatctttatatgggaatggttattagacttaccgtggtgaccttttcatgtgtaatgtataaaaatatcaaatcactatgtttacttgaaattagcatcatattgtaattaaattatacttcaattttgaaaaaaaaatgggtctatagagttgccggccattgggaggagaaatgaacgggaaataacaaagaagggtcagttgaagacacaggaggaaaaacaccaaagtgttcagtgaaaaagggcagagcttcagaaagcggacactaagaagagggtggtatccaggcagtcttaaatggccatgtgctcctgccccgctctgtagcaatctatgatgagcaccctcccccaaccccagtaatccttgtggaggcttcagaggatatgagcctgcaacctaagtgcttcacttttctgatcctggaaagaaacagcatgaagttctgaagtctggaatctactaggatgatggacacacacttgttcctgctcaaagataaaccacccctgacaccaccaccatagtgaccactgcccccttctgaagtcagggcttcatctactgtattccatcactctcactccctacgcttctatcagggacctgtctctcctccccgctcacccagttccctcgctgtggctgctctccacccatcttccagccctgccaaacctcacagcattgcttctgctcagagtcttcctccccttggcccccaaagatccctacaattaggaaagagggaaaagggaagtagattttcaacactaaatcaaaaacagatggaggctgcgtgtctataggagttcgttaattgtccaagtgtttgctcctcagacccttcctgatctttcttgtgtgtgtgtgtgtgttacaaaaaattctgtcagagtagatctgtcttttctttaccaaactacacaatcctggggtttagccttagtaccataccataagcatacaagacacataaatacttctagatgctgcaacttaaaataaaatgtgtattcccagaggcaaagctgacttaacgctgaatggatgggtaagggagtctacaatccacaggagtaaatctgtatcattctaggcctggcattgatgttcatacgctccagaaagaagatgagagactgaaaatcaggaagcctgggtttgagtcctgctctgggcttccctggtggctcaactggtaaagaatctgcctgcaatgcaggagacctgggttcaattcctgagttgggaagatcccctggagaagggaacagctatccactccagtattctggcctggagaagtccatggactgtatagtccatggggttgtaaagagttggacactactgagtggctttcattttcactttctggtcgatataatcaaagctatggtttttccaggaattatgtatggatatgagagttggaccataaagaaggctcagcactgaagaactgatgctttcaaactgtgatgctggagaagactcttgagagtcccttggactgcaaggagatcaaaccagtcaatcctaaagggaatcaatcctgaatattcattggaaggacagaagccaaagctgaagcttcagtaccttggccacctgatgtgaagagttgactcagtggaaaagacactgatgctgggaaagactgaaggcaggaggagaagcggacaacagaggatgagatggttggatggcatcaccatgagtttgagcaaactctgggagatggtgaaggacaggaagcctggagtgctgcgcccatggggttgcaaagagttggacacggcttagtgactgaaaaatgactgcccctaaggagctggttagtctccagcctgtttcttaaccttcttaatcctctgtttcctgaggacactggccccaatgatcgccaagttcctttgcaaatacaagtctcatttttgctgatccgtccatattctttctcctgaccttgtgatggacaaccttcatttgataaataacgacgccagggtgggaaaacctagagcaccagaattcgtcatcatttagatgcatgccaggctacatccccttcaaatgcatgaacatcttcaagtcgttcatcttcattcttccctggaatatgctcacacaccattttgcccccacatcccctggtttttcagtagagaaaaacgaggttaggaagtacctagctgctgagctgtccaggggctctcacatactaggtgcaaatttgtgcagtaagtggggaatttctcatcctaaaccctttcactttgttgcaggcagatgccccctgaagccagcctgaccaactccacagacatctcattgcgtctgagactcctcatcttcagaggatgtcagaccagccaacacctctttttacgcacagagaagtgctttcagccgccctggggaggggtttggcaaactgtatctggccctcagaagaacactgggcctcctctgtttcagggggacacgtgggacctgctcactggagaagggaaggaggcaacacggaaacgccccccaccttcggctctcccaccggaggggagggggccagggtggtgtagccacaggagaggcaggaacagacaaaataggaaactctcaaagggcaatttaattttagattcaaggccaggaaattgttttgaaaacaataagagcgatgggcttgggtcttggcaaaagggcaggtcggactactgcagattcctgagagagaaatgaatctgaagcacagaaagagcagagatgggactgtcaggttccaatctccatgagaagctgtgctcagcctccaaacgggccacctggaccacatgaagccatcttgagatgccccccgccctggggctgcagatcaagtcaggggagggagacagtgaccaaaggtgaagctcctcacaccagtctgagaccccagtcccctccactcaaaagacattctcttgctgagaggtagcgggtgacatcctgtgttatccatcaacttctactcattaacgggaagccttgagactcccagtgactccatggggtgccagcctcaggcatccagcccagagcttggaggtgaagggtgggcctgactcagagcctcctcacagagggggcgaacctcccatggagaaaaacctggacaggaatttcaatttgctcagaggtctacaaaattgagttctgttttattttttcccctaaaccaaggagggtaaattcaccatgaataaagcataccgacacatcagttcagttctcactcagtcgcgtctgaccccatggactgcagcataccagacctccctgtccatcaccaactcccagagcttactcaaactcatgtccatcaagttggtgatgccatccaaccatctcatcctctgtcgtccccttctcctcccaccttcaatcttcaatcatacggactcatgagttggcataaattcttatccatccccacatttcttaaaaacggtcaagagggggacttcccaggaattccctggtggcccagtggttaaggttctactttcactgcagggagtctgagctcaatttctggtcggggaactaagatcccgagtgcagtgtagcgaggccaaaaataaattaaatttttttaaattttatttttaaaaagatggggacttccctggtggtccagtggttaagacttcacctttcaatgcaggggtacaggtttgatccacggtcaggaagctaagatcccacatgcctcatggccaaaaacccaaaacataaagcaaaagcaatattgtaacaaattcaataaagacttttaaaatgctccacataaaaaaaaaatctttaaaaaatatgatcaagatgcacttaatgataaggagtgtcccaagccaggagccggaagatccagaccacactccatcctttaccagcctgtaaacttgggcaacttcgtttactctcttaggacctgaatttcctgatgctgggagacggtctcaaggttatggtctggctctgaaattctctaacttgtgctgactgaaccccatatcttagaaaatccccactttctaagatgctggaaaaatcttttttccttcacttcttctgactatcactaagaattatggttataggatttcttaaacatcatattccagcaacctccccagaggtaaagctaacaccatcccaagcaacgaggaaaaaaaaaatgcttttctggtttccatttacattctaaatttctttttctgtcttctcatttctctaatccaggagaaggaaatggcaacccactccagtattattgcctggagaaggccgtggacagaggaacctggtgggctgctgtccatagggtcgcacagagtcggacacgactgaagcgacgcagcagcagcagcagcagcagcagcggcatttctctaatcagggattccttatccattgctctccaggatccccagaaagaagggaaaggtatgtatgctaagcttcatagaaataagaatcagcccttccagcttcccagaacttcaggggcaacacagacgtccctgtgaacacatcctacggcatgtggggtggaggtgaagagtgcgaacagcaaaggctaagaagagaattgcttcccaaggaagcccaattaaactgcaattactccagataagagaaccaagtctgtttacacaatggggctgtaaaccaccagcccattacaagagaactttgatctgggggcaggggagctatttctggtccagggtagagaggaagcagggaggtttctcagtaagagaaataagaatggctccactcaccccaaatccccatcttgttctggctgcaccctcgtaaggacaaaataggtggaatcacctccacctccctgtgttcatctcacacaatcgaaaagtccagagaaaaacagagaagaggtggtagacacagggaaagggaattaactaaggtcatatttctggctggtgtcacagcaacttgacatggtaagtataccctgtgcctgttttacagatgagagtactgaggttcggagaagtcatgtgcccaaggtcacgtggctgaggagtaataaacagaccaaaatttaattcaggtctttctgactccaaagcctaagtgctttccatgttattggattggccaaaaagttcctttaggtttgttcataagctgttatggaaaaacccaaaggaactttttagtcaacccagtgtgtggccaggctatgttccacagctgtctggcccaagccataaggctcagggccttccatgtagtctgacactctgaacagtcacccttgcctggcatattattaaagagtaagtccccgacataggaaccttcaagttgtgaactttcaaagacacaaatgtgcattccatcatcatcaggtgtgagtgacgttacagcttgctccccccgaccctgtctcctattgcaatatccccgctcctctccatcctccaggtagtgactcttcctgcctgttcacttgatgccagccctcggatgtcagctgttgtatggtactgctgtactttccagggtactgcactgtaaaattaaaaatgttttcttttttgtgtttgtgttttatgtattaattgtatgagaagtattataaacctattacaacacagtaccacagcgtgaattgtcttagttgggtacctgggctaactttgttggacttatacataaattggacttataaaggcgctctcagaacggaactcattcgtatgttgggatacttactgcattcccaaagacctgagctccaagagtaggtgtgtgggcagttgtctattccttccctctgaacagttcaaggtgcttcctaagctcgagtgacccaaggacctcctccacacgctggtgagggaaccaaggacagggacatgcttggtccaaaccaggggcagcccgccccgcccattcctgccctgcctcctgccctgaaagctcagcgatgtgaaggggaggatgacgcaggagaggaccaggggtgcgaggaacttccaggagcaaggcagcaagctcttaaccagcataacaggaaggagtgcttcctcccactggatgaaagggtccctgacacacagcccatataagtacctgcaaacgtcaccccctcccacacaatggccagacaacttccagaagtgtcgtttccctgcctcccccgctgtgacatcacttctttcatgaaggttttccaggaggctgaccttccaaaggggacaactcgtgtcctgctttgcacaaaggggcctcgaggcagataatgtgtgttctgcatacaatggcccttacccgagggatgggatgaattttgcaactgttgctgtgatcattttaagcctcctcctggtacagcaaataatcaaatcatactaatgccagctccaattctcagtcaaggactctgagactgagtggtctttaagggtctagaaaatatttatgtcttggtttagaagattgtttcttggacaactaaagcagtctgtttagcagaaaccctcgtttctgctgaatatagtctcaccttttttttttcctaagagttccctttcaaacacaaggagttacactcagtaccaggcttcccaggtggttcagtggtaaagaatctccctgccaatgcaggagatgcaggtcaaaaagatcccctggagaaggaaatggcaatccactccagtattcttgcttggagaatcccaaggacagaggagcctggaagctacagtccctggtcagacacaacttagcaactaaataccaacacacagtactacccctccttcaaacccaatcttgtgtccattctagagcacaccttctcaaccttggtgctactgacagttgaggctagacaattctttgtcatggggaattgtactgtgtagtgtagaatgcttagttgcaacccagacctctctcctctggatgccagcaacatcctcactccccaaattctgaccatcaaaaatatcaccaacaaaatcacccctagatttaaaaaatccactagttttccttttacccctcaaacttcccattcggggatagcttctcttcctggtggcccaggctaactaatgcagagatcagggtgccaggcaggaggacttggttgattggattaagtacaactgattgagccccagacgacaagactccaacagaactgagaagattcagatgcctgggacgttcacgttcacgttctcgtctggtaaagttcatgaagctgggctcactcctccaggagatctcagattgggattgaaagtataaggtttgctagtttttctgctaatgcctagagcttatattctataggtgatttaccaattctttcactgtcatagcccagcctgaagttgaagattatctgtcagaactagtacactgaacttgagcttggatccatcaactttatttatctaattttttaaataaagaagaaatagacgaagaaggcagaggacttcctggttgctcagtggttctgagaaatttgcccaactagctccagtggtagagaaactgagccccagaaagaagttgtaagcgctagtactgtaacaataacatagcaattcgtttacgtaactttctacttttacccaggcaactctgaaatatcgtattgaaaaggatcccaagggttgataatgtttttcagatatagctattgggggtggggataaatgagttctttgttttgaaatcagtggaaacaattcaaaatgcattaaaaataccaagtgtattcagttgagggtggggtcttcagttgaaaatcacacttagagttgttttttagtttttttcaatctcatacaatttccagatgccctgtctaggataacttaatgttatacctgcaacttatgtacttgtactgcgatttatttcagtgcctaaaatataataaacacaaatttgcatggtattgctaaacaagttattaatcttatttaattggattacaatattggcaaagagaattaacataagctgcttttaaatccacttttccaagtcaatgacacagtgtgccctggaatcacagtatccttatttaacaaatcttcacactatcatctttaagaaagatttagtgtcatttgtgctgaccttagatgataacttctttgtgagaagcagaagcagtcttttccctggccaagtctccagccatatggaccttaacaagtcccttggcaatttctactaagcagaatggagtgatttttggtctgaacttgtgcgtgtgtgttttaaatgtatttctgatgtaaattgtactctaaacatttccctgattctaatttttaaaatataatgaatggtgtttaaatggaaacagaagccacttaaaaaagaagaaatatgtgtcacagaacagtcagggaagaaagatgtattcatcgttccgtgaatgtggaatagctttttaagtaattattttcctaatattacagatttaaacacatcaaatcttttgacaattacagtgaaaggtcatggaaaactgaagggttttcagtcaaaaccaaggttaaaaactctgcagaggaggcagaaaagcattctggtcaattggtgtctatttagaccgacaaatgtatttagaaggattaacgctaaacttatctgtccatttccagagtaagtaataaatgagggccacccctgtaaaaatacacacagaatttagaatcaacagttaatgattcatcagctgctattaaaagttcacttaacagtggaattgatgaatgacggcattttgggatctctcacacatcaaatttataaggaatttagctaaatatttctacagatcagcatgtaacttgggtaaaagccttcttccctaagagcaaaaaaaactttatttaaaaaggaattttaaaattcctcttacccctctttctctaggactcaggaactttccctatcaacttgtcacactttatttccagtttcaaattctatgattagaaaaacttgtatactttagcttttatgtatgaggaccaaaacaagctaaattatgctaagaataggtctaaggtacatcagtgtgccaaaaatcttcagcaaatgaactgaactgtgaaaaatcacctggctttaaccattattcaagtttgagtcgtattctctgcaagacaagcatgctaaaaaatcttccttagcaaatccatcagtcttggatgtttcactttatatggtgatgaaaagacagataatctggcaatgtagtccctccaaaagatgtaaagctgattccagcttggagttgggttctggctgcttctaagagagatcagagagcaggagagccagggagggaagggtggggcctgggaagggccgaggaggagtcctacttaccagcactgcaggtcgagctgctgaataggtggcagggccactcactgcagaatccacaaagtagctcatcacgctgtcagcacctgcgtgggagaaagcactcactgagctgctgggcaaagaacatgtatggatgagaaaccaaagaaggcctcggatcagatagccttagaagcatcgaggtcacttgtttgtgttacggagaaagaaatgaaaatgtagaaaaacaaagagggagtttccctggtggtccagtggctaagaatctgccttccaaagtaagggaagctggttcgatcgctggtcgggaaacgaagatcccatatgcttcggggccgctaagccaaggcaccacagctaactgagcccgagagctgcaactaagacaggatgaagccaaataaataaataaatatttcacaagataatcatagaaaaccaaagcgaccaacagggagcaaggccgactcctgactgcaagagagcctgaatggtggtgtctgaggcagacagttagcactcagagaccacagaaagaccctttagagggtttctgggcaggaataggt

SEQ ID NO: 211 - DNA, 2443 bp, Hippotragus leucophaeus
  source 1..2443: mol_type = genomic DNA
aaaattttatatttaaaatctcccaaagtctctatacattttttctcacataaaactgcggagagtgaaccttcagaaaaaatgaaagttcagagctctaaatctactgagtttttcttaaaaaaataaaacccccaaaaggaaagtcaataatttttatacaaatatgtacaaagaatttccctctcatcccccaggtactgagagcaggcgccgtccgggtacagttttggaaaaatcggttttcggttttacctgtacggaaagatactccccgcgggcgagcggtgagagtttgctccgccagcctaggtgtgcaggactgggtggaggccgccgaaggtcggtgtcgaggggtcgggggggaggaaatggaagagaggcagagtccaggattgggcaggggggccaggagcggggcggggcgcgcagcttgcaaattgcagtcgactctccaggccgctgccaggccccgcatcccggccaccggcgcgtccctattgagcgggccacttggcttgagcagcggcggcggcagcagcggcagccgaggctgcaggctgcagaaactgtccagagagcggtacgctcagaatcggcgcgatggtcgccgtcgtccgactcagtgaaagaggctggtgcgtggccatgagcgctgccgactgcacggtcccgggcggccgcaggaaggactgcgcggcgccaccgcctccgctacccgcggtgcccccagttaccccggcgcccccagcgcccgcggccgagctcccgggagtcgcggggccccctccgatgatattctcgatgctgaacgacggtcgcgcgctcggctcggacttaatgagcgacgccgtggtgcccgcggcgcccgccgtgcctgcggcggccgcggcggctcccaagctgttgagctgcaactgcaggcccgggccgagttgcgagccgaaggcggccgctttgcggcccagctcacccgagggcagcagcggcacggcgggcggcagcacgggggccacgggcggcagcgcgtacgggtactggagcgccgcagccgccgccgcagctgccgcggccgccgggtgcgagtaagcgccggccgcggccgcagggtgcaggccgtaggggcggccgtagggccccgcggcgccggccgccgccgccaggctgtaggcgccgaagctctgcatcatgagcgccgtctgctcacgcaggtgctcctgctggtggcgcttgaagcgtttccggcgccgcaggaagctgccgttgtcgaacatgtcctcggactgagggtccagggtccagtagttgcccttgcccgggttgcccggctcccgggggatcttgacgaagcagtcgttgagcgagaggttgtggcggatgctgttctgccaggcggggaacttctcccgatagtaggggaagcggttgctgatgaactcgcagatgccgctcagagtcagcttcttctgcgggctctgcaggatagccatggtgatgagcgcgatgtacgaatagggcggcttcaccaggctgttcttgggcttgctcggggccaggccgcccgccgcaccgctgccagagccgggcccgccaccgctcccgccgccctcctcgccgccagcgccgctcttgcagccgtcggcctcggatgctcccgcctcgccccctggcccggccccggctccagccacctctttgggtagtgccaggggctgctggtgtggcggctgaggctgcccgtggtggggtgccaccggcgtcacctcgtccgcctcgtccaggcgcagctcgggcggccccgcgggactgtcgcagcccccatcgctgtctttctcttccagcgcgtcgtcgccctcgcccaccacatcgatgtccacgtcctcggccgtcagcaccgtctggccggacatgtcgctggcgctgccgccaccggagagggtcatccctcctcggggttggtggcggcggcggggaaggagcggcgcgcgatgggcgtcttcaggggttgccgccaacctcaagaaaggggtttggggcgcccccgaaagacaggggattgggagaggggaggggggcgtaggtggtccggggccctcccggcttggctcacagtcggcggccgggcatcgcacgactcgggctgtgccgtccgccccccgtggcagcgctccgcaaactccagctgtccctggcgctcggtactaggcgctcgttgctgctcccggcagcggcctcggacccggcccgggcccggcagcttctctatgccgcgccccctcacttcgcctgccttcctctgcctccggcccgggcgtggggcgcaggagcggtgcaggcgggcgcgggacgcggggcgccgagcagctcaggaaggtgcgggcaggggtaaccgggggaggggggtgtcagggacgccgaagcccccgcagtcgaaagtcccgtt

SEQ ID NO: 212 - DNA, 33615 bp, Hippotragus leucophaeus
  source 1..33615: mol_type = genomic DNA
ctatggcacagtccttcgtccacagcagtttcctgtcgtttgtcaatttatttctcctcctccaaacttagctgagtgaccttgcgcaagtcactttccatcgtaggcctctgtcaaatgaaagttggcctcttgatcgccaagcaatctcccaaagcggaatgggacacccaagttagcaggcccactttcttcccccgggacgaatggtacggtcccggggcagccccacccccccccctgtcgcggaccttggtacaggcccagggggccctccgaggcctcgccgggctgcccttgccccccgccgagttccgggccgtcccagcgccgctgattggctggagccgtgcccgggctgcgcggctataggtgagcccgggcggggatgggcggagcacgctggaggcccggcccctccccgcgggtcggacgctgagcggagccaccggcgggagggcggacggaccgattgacgggagggacgggaggcgagcaagatggcgcagactcagggcaccaagaggaaagtctgttactattacgacggtgagcacagtcctcgcgccgggggcggggccgggcccgagccgggcgggatccgggagagggagccgaggaggtctggggcgggaggctgaggcgtttgggaaaggctcagggaggaggctgagaaaggaggctgagggcagaggctggaaaaggctggggttgagggaggaggctaagaggaaaggaggtggagcttgagggggaaggctgaggggaagggggtcgaggcttagaggggaggcgggggcgggggcggcggggggtccgaggtcaggagggtcgcctggggaagcgtgaggtcaccttggtggggaattctgaagtctgatgtggagtttgccgcggcctcctagaggggaggctgagtccgaggcaggaggcagaatctggtgaagaagattgccgggtgacatgttctgctgagaatcctacgatctctcactgcccctttccttcctcatctcttctggtgagaggcctgcagggctcagcacctagaggtcaccagctcccctccccctgtctcccagcgggccctgcggttgctgctgggaaatgggactcctggggttggaagaagaaggatgcaacttgttaaaacaaactttttcgttgaacagaaatctgtggagcagcagcttcttctgttctaggtatcgtttaggggctgaggccaggggatgatcttgccaccttcctttcactcagtctggaggagcatatagaccatgacagaaaaattgctctacactatcaggttgggaggaaggacagctcagagtttgctgggagcacagcgaagtatctgcccagcctgagaagtcaggcaaggaggtgccatctcaattaggatctgaagagcaggagttattaactaggcccaggaaggataaagataacaacaagttgagaggtaagagagaggcgagcacctttgaaaaatggctggatgtacagtatgttggaggcataaatttgaaggcacagtattagaaggtgtagagcaggagtgagaaaaggtttgcaagtgatgaggctggagaagtaaatggggaccagatcatgaaaggctgggcacaccaccctacgaaagttggattatattcacaagttgggcactggtgagtcactgaagtcgtattcaggttagtgacatcatcagatttattgtaccttagaactatcactctgggacagaagttaaatgcatgaatggagaagtaaggaaaaaggcaaggatcccaagtatctagtttgggcagtttcatgctgaatgtagaaggccatttcagttgataatgttgggttttgttttttaaagaaacatttgttgagctgtctggggaatatcccaagtagaggtgtccagtaggcagtggccattcaggtctgcagtttagaagacaaatgggaaaatagaaaattttgatgattgtcagcatacatacatacagctgataattttagttacagaagaggatgcagttacccttgtatcccatatgagaagttgtatagggtgaaaagagaagagggtccagggtgggattctaaggaggtggactaagaaaaagtctagtgttcttcatgctctgtgctcctgggtgtgtagagtatatttgtacattagtcactgtgtattggaattgcccatttacttattcatactttttacagacagtgaactccttagggaaaaggatcatgttttgtctacctttgtatactcagccccccaaaacagtgcctagctcgtagtagattctcaaaaaataccgttcataaagtgaataaagatacagagggaatgacttgagaggtaagtgaaccagaaagtgctgggttacagtagccaaaagagggagggagtggccaagtgtcggcaagaactgtttcctgtgcagcgtttagaactgaagttaaattgctgtagactgaagggttgagtgaagaggagacattagattgaacttttttttttaaaggaaactttttttttttttatcataccactctgtgtgtagggtctttgttcccaaaccagggattgaacctgtgccccctgcagtggaagcacggagtcttagccactggaccaccaacgaagtccctttaaaaggaagcttgttgagacagagagaggcttgttgataaagaggagatgtagtggctgagagttaagtatgtgcaaatttttatggaaattagggagaggttgaagatactggggagaggggctagtaacgatggagatccctgaggagcgatcaggtgagatggaaaccagagcacacgtagggacacccctctttcaagaggaaattcctttgggataagaggttaagtggcaagaaaaaacatgtttgaaggagagaagatggaaagtggagggggcttttaggatgaagtaagaaaatattccttttcatgagagtcggggagggcagttgggtagaataggaatcttgaagagagatagctgttatgaaagagggagcaggtaaaaacatttgaagccttgctgggcagtggtgagggcccatttgaagctggagtctgtgacttcatagctttatcagtttgcacagtttggtgatctccacattctcagtttaaaaagagaaaaagtggaaagacctccatctttagagaagggtgatctcttcctttctgagaaactacctgtgagtttctcagtgaggtcactagtttgggattgaaatttggctctgctgctcaaaagctttgaagtattgggcaagtcattttacatttccaggcctcaggcctctcccctataaaatggagaaactatgagaacagtgtagaaagccctttttaataaagttttaaaaagtttgaaacagctggactggttccaggaccccagcacaggtatcagaaggatgctcaggttccttaaataaaatgacatagtacagtaggccctccttagcctgggttagtggatggggagggccaactcttatctataaggattatttttttttaagtctctcagcaacctgattaaaaactgttaaagacaggataatgtgtttgggccccaccctcaggtactcccttagctttctagataagttatctcaattccccaggtctaaaccttggctggattctgggttgataggcaggggagttactagggatcaagacctataccagagaaatgggtaagcaggaatccagtttgtataacatagcaatgaccttgtgactcttgactgcccagaaattgggtctgcatcttgaagacttggatttacctggtggctcagatggtaaagaatctgcctgccatgcaggaggctcaggttcaatccttgggtcaggaagatcccctggagaagggaatagctacccactccagtattcttacctggaaaactccatggacagaggagcctggcaggctatgattcatggggtcacaaagagtgggacacaactgagccactgacacttccactttctggaagtctcagctagtgccttgagaacatgttctacctaaccccgtggtggtaaagttgtctgaggagccctgggaacagacgtctctgactgccttccctcgtactgtatctcaaagtctgtctgtatgggactgttggatgccactacatgctgtgctctggcttgtgactgtctgagaacacaggcctcattaaaatgaagaggatgaaccctaggtgttcactgggagaacactaaggaaatctaaataaagtatggacttttagtaaataattatcaatattgcttcattaattgtaacagatactttctgtttcactaatgtaaaatgttaatagaggaaatagtatagtatctaagaactttgtactttgcaatttttctgtaaacctaaaattgttctaaagaataaggtttatttaaaaagagagagggacttccctggtggtccagtggctgggactctgcactcccgcagggggcctggattcaatccctggtaggggaactagatcccacatgccgaaactgaagatccagtgctgcagtaaagatctaggatcctgggtgccgaaactaagaagacctggtgcagccaaataaatatttttaaaaatagagaaaaggatgagatcctaaatattcaactgtttagtagtttcctattatcacaggccatggagtacagcttgggttctgttggtggcattccccacagtgcattgctccctggaatgaagcctatttctggcactactaaatcattgattaagaggttgggaccctttgtttcattggtaatgcaagatctgcctcatcctagtgaacttccaaggagagaactttgggtgtgcaattcacatgattttgaaatattttcccaggaactttgtaccagctagactacagagccctttaggttaattgcaaactgaagtaggtacctgggaaacctgataaaggtgtttttttttttgttttttttttttaatttttgaccaccccacttgggcatgtctcagttccccaactacggatcaaattcatgcctcctgcattggaagcccagaggcttaaccaccggaacaccagggaagtcctgctgatacagtttttaacatcctggatttggagttagaagggtcgacactcagatcattcattagctgtgtgatcttgaggaggcacataacttctctgagtctcagttcgtttccttgaatctttattcagcctgtgtgatatacagggcatatatgtccttgccttcaaggagcaatcttggagatataaaatagatatgtaaataattgagatacaaaattaagtgccatatataaattgcatgcagaggaaaagacgatttattctgattatgactatggctggagctttagctgacctttgtagtgtgaggaggatgctcagagaaggaatgaaattccaagtcaaagaaacagtctgaacaaaggatactttggtatgaaggtgaatgcgttcaagaagctgataataatctagtgtgttcataacagagattggcagttcaactcagttcagttcagttgcatttgactcgttatgaccccatggactggactgtagcatgccaggcttccctgtccatcaccaactcccagagcttgctcagactcgtgtctgttgagtcggtgatgccatccaaccatctcatcctctcatccccttcacctcctgccttcagcctttcccagcatcagggtcttttccagtgagtcagttcttcgcatcaggtggccaaactatgggagtttcagattcagcatcagtccttccaatgaacattcaggactgatttcctttaggctggactggttggatctcttcacagtccaggggactctcaagagtccactccagcactacagttcaaaagcatcaattcttcagcgctcagctttctttatagctctcatgtccatacatgactactggaaaaacaatagctttgactagatggacctttgatggcagagtaatgtctctgctttttaatatgctatctaggttggtcataacttttcttccaagaggttggcagactttccataaagggtcagatagtaagtattttaggctttgtgtgcctgggagggcttcccaagtgcgctagtggtaaagaacccacctgccaatgcaggagacttatgagatgtgggtttgattcctgggacgggaggatcccctggagaaggagttggcagcccactccagtgttcttgcctggagaatcccatggacagaggagcctggcaggtcagacatgaccaaagtgacttagcatgcatgtgccatatgggtgagtttctgtagtaactatttagctactcaactttgccattataatgtaaaagtagtcatagataataaaactaatgggcattgttgtattccaataacatcttatttagaaaaatcaagcaaccagttaaataacccaaatttgcctgctaacgtctagagcagaatgtgtatgtatgtgtatgtggtatgtatgttggggtagggtggttgtggtaagaagttagaaacatagattaagaaagtcctattgaagttgttctttatgctttatcctatagaaaatggggaaccattaaggatttttgagtaaggaagtgatgttatcaaagctgtatattaggaaaataactggtgtggcagatagtttgaactgacagcagagggaccagtggaaggttattgctatggataaatgaagagatggtgggtttatggggcttccctggtggctctgccagaatccttgccagaatgctatggacagaggagcctggcaggttacagtctgtggggttgcaagagtcggacacagcttagcgactaaacaaccaaccaacctggtggctcagtggtaatctgcctgccagtgcaggagacatgggttcagtccctgatttgggaagatcccacatgcctcagagcaactaagcccatgtgccagtccttgagactgtgctctgtagagccggggaaccacagctgccgagcccacatgctgcatgccttaaagcccgtggtccgcagcaggagaaggcactgcggtgagacgcctgagcaccacggctagagggtagcccccattctcctcagctagagaaaagcctgagcagcagtgaagaccagcacagccaaacaggaaaagaaaattaatggataagctaagttttaaagagatgatgagtttagtctttaatctataaaatgggaataatactccctgtcttaactattttccagggtatttgtgagaatccagtaagaaagtgattgcaaaagtgctttgacaccataaagtattctggtgtgcaggaggtgaactgtgacttacagtaattctgagtagtgatgattattctttctgttgtgggagtgaattccttggagacagtgaggtgagtcacctcactggccgctgttccccagtagctttggactgaccccctcacactgtctaatgcctttgggttccaagggaaaaaactgggctagacagacatccttaagtgctcatctcactacggtcccctgctttttgttttggagttacccttccttgatgtgggagagaatcttggagcctagaatgaaccagacagaatttgcctagaaatttgttgtaaaaatctgtgggttctcctgggagtgtgtgtctaactgtgtcactgatgctgtcactctttcgtcttcaggggatgttggaaattactattatggacaaggccacccaatgaagcctcaccgaatccgtatgactcacaatttactccttaactatggtctctaccggaagatggaaatctatgtgagttactgggagctttacccctccctagcctcttcagctctggttccccatgtatcattcattatctcattttttttcaattactcatttatgaaatgtgttgagtgactgttacgtggcagacattgtaaatggtagagattctttgttttttaaggtgctcactctagtgctggtgaacaacatgtacacaaattgtactagagtgtgtaagggcaacgacttaaaaatgtgtaagattcagaggtattgagatggaacgtggaagggagccttggaatgtttcctagaagtgatagctaagcagtgttttaaagattaaatagaaattagcctggagttcaggaggggactagcattctaggctgagggaagagcatatacaaaaaggcagaaaggtaggaacaatatgatgtgtttagggaaatataagtagtttagtgtgcaagtattgctgcagtataaagttgacaagtgtgagagaggggagctagagctggagaggtcagcaagaattggatgtgctatattaagcaattttgctgggccagggtcaaaaaatctagtccctaaaaactaagtgattggaactgtgttgaactagataccaagtctctagagttactagagagtatggactttctagccatttggcctggctccagctgatgtcttgtgccacatcttccagttttccctgatggctcagcgggtaaagaaatctgcttgcaatgcaggagacacaggagacatggattccatccttggattggaaagatcccctggaggaggaaaatggcaacccactccagtattcttaactgaaaaatcccgtgggcagaggagcctggtggactgtagcccaaagggtcacaaagagtcggacacgactgagtgaccaagcacatagcagtttttaaagagaagccagaactctggattattacatagagtctccaaggtttaaaatgttggcccaagtttgtttgaaacatgtaggaaagaaagtacatgaacatatctgtgagccaaatttggtccagagtttcccaatttgaacttttctggaggctgtaaaaaacaaaagaagtatttattcaaaacattttgtttatttgtttggctgtgccgggtcttagctatggcacacagcatcttccatcttcattgtggtgtgctggatctttagttgcagcattcaggatcttttacttgcagcatgcaggacctatttccctaaccccgggattgaacccaggcccgctgcattgggaacgtgaagttttagtcactgaatcactagggaagtcccaagtgaagtattttaaatgagaaataggaataggcatgcattttagaagcagggaggctaagttaggaggctgttgcaagagtccaaatgagaaaataaggaggggctggggggcctgtgttgccttatggttagagtgtaagggttgttgaagtctgtgctgacagcttacgtaacctagcagcagcagcatccttccccaccattccagagactgaaaggagaggaatcttctgtcccaggcgaccatgtcatgtctctcgagcccctggaggcagctggggaagcaaggagggaaggtagacggaggagcagatggaacttgggaccagagagcattttcaggtgtgaagggcatctgggaatgaaaaacataaaagatagcagaggtttttcagggactctagggaacagactagcatttagatacagagagggtacctgaatgtggaatagtaagcaccaaggctccacggggctgcttgttgcacatctcagccatgctcacctggcctcagtttgcctccctccctgccactccaccctcagaaccctccatttcagccagatcagattctgcctctttccaccccattctgatggagaggattatttactccacctagtcatatctttctcattttcaagagttgcgttaagcactgtttctttttttcattcaacagatttttgttgagtacttgttataactcagggactttattaacctccatgagtgatactgagatattaataataaaaaaagggtcatatctttaagtgagaggagaaattaattaacatttattgaagattgctaggtaccaagccagggctactgttatttacttaatctttatagcaaccttgatttgaatcactctccactgtgcctaccctacactctatttttattaaagaagaaagcccttcctagcaacttcctaacagatttccctgtaagtctcattgggtcatttgccatacttagaccattcaccagcaatttgatccttggggctgggtatacccaaccaagttgagatctgttaaaaagagggaagggagagaatagctctttgggaagtaaccaaccatggctgataataggagataataataccttattggagattacttcatctgtgtggtattcttattgtaaactaaagtaaaagcccagtgtaatctcttggtgaaatcactagaccatgttctctttcatgtgatctttttccttttctggttctaccttttttttcccctcaaaaaaaatttttttttttaatcttttgaccatactgcaaagcttgtggaatcttagttccccgaccagggattgaacctgtaccctctgcactgggagtgcagagtctttaccactggaccagggaagtccctggctctgtgtctttattgagtatgaatctttagtccttttctctcaacagcgtttctctgttgatctcttctttcttctcctttctctgggctatgatcctagcatccctttcccaaaggacaaatagccatttattttagtgtctgtcctgaaattaatggcttttgagagttactcctgaaagaaattccctagacttctcatagaagtttctatacctgaaggagacagattgaagtctttttcacacaatttcaccttcttgggttccttctccagttctttctctgcacatctaattaatctctcccagaatcatatcctcacttttcatccaggcatcttcctatttacataattaagaatcctgctctcttccttgccttggatactaattttgtatattcccaggcttcttactcattgccttctgttcctttttttaaatgtttttataaaatattgtgtagatatgaaagaatttttacaaaatatatgtaaagtataaagaatcacattattattattaatagtaccttgtttaagaaaaggaatatttccatgactgttagaactcgtctgtccttccctgattctgtcttccccagagttaacctttgccctgaatttggggtttattatttccttataattttaccagtatgtatccttaaatgatacatattttactttcacatgtttgaatgttacataaatggagccatacagcatttattatgtgacttgccttttttgctcagtgtgttcctaagtcattcatgttgatacatatatttattttcactgtatttcgaaagactataccacaagttgtctattttattggtattggtgggcttttggtttgtttctaggtttgagctattacaaacactgctgctatgaacattctttttaaaatatttattatttctggctacactagatgttagttgctgcacgcaagctttctctagttgtggcaagcagggtcacccttctttgtggtgcataagcttctcattgcagtggcttctcttgcagtgcagcgtcggctttaggtgtatgggctcagtagttgcggccctcaggctctcctgggctcaccaattgtggtgcatgggctttgctgcccggtagcacatggaatctccctggaccagggatcaaacttgtgtcccctgcattggcaggcagattcctagccactggaccaacaggtaagtcctgaagactctggaacatgtctcgtggtgcccatatgcttgagtttcaccaggtggtgtgctcggaggatataggcacacagtcgtccttattgctgtttggcatgcagataatgccaagatggtatttctcttgttactagtgaggttgaggatctttttacagatttccctactgaagttcccattcaggccttctgcccatttttctttttgattgtctggttattcttgtgtttctgttgtaattggctcttcgatacatagaatcaggttaattgtttttcttggcttatgaacatccaaagattcatgcttggccatcttttttaagaatttactttgtttattcattcactttacttaaatatttttttaatttattttttctttcttaatacttaaatattttaataatgcaatgaatatccatattcctacaacccgatcactcttctaaattttgtgattactattcttttgcttatcatattattatgtttatcatgtatatatgtgcctaaaaatatatagtatttatgtacttgttcttgaattttttaaaaagggttagcatgctatgtgtaatcttctgggacttggttttgtctcacaatatatataattattaaaatctatccaacttgttgcatatagctataattctctcctttttctctgctgaataatattttatcatttcagtatattttatcatttcagtatatcataatcttaatttgtatctctgttttttaaaaaattaatttattgttttggttgtgctgggtcctcattgctgcgtatgggctttctccagttgctgtgagcaggggctactctttcttgtggtgtatggacttgtcttgttgcagagcacaggctctaggtgcccgggcttcagtagttgtggcataggggcttagttgcccctcagcatgtggggtcttcccaggccaggggttaaacccatgtcccctgtgttggcaggcagactctctaccactggactaccaggtaagtcctgtatctaggtttttaatgttaggaccagtttttctgtgatactcttagacatgtctctaagtgtatatatgcaaaattttcttgtggctcttcatctgggggcagaatttctggactataggatttgtgaatattaaatgccaagttgtttttcattgtggttgaatgaattggcaatatataacagataccttgatttgcatcctctcttatgcttcgaattagactttaaattttgccaatcaaatgggtgaaaaaaaaaaactgtaattatggtcttgatttggtttttttgggctgtaccacatggcatgtgggatcctcgttccccagttccctgaccaggaattgaatttgtgttccctgcattggaagcatagaatcttagcctttcgactgctagaagtcccagtgttgatttgcattttgctagtgaccggtaaaactgaatgttctctactataagtatcttcatttcttttgcccatttttctcttgggtcatttggctttcttttcttaccaatttatagtagttttacctctctcttttttatttttggaccacatggcatatacagattcttgattgtaacatattcatatttattgtttcctttaaaagtacttttatgtcttaaaaaatgcttcccaacctttaaggtgttctcttatgttaatttttaaaaaatcttcataggtttgtctttcacatacagatattcacttatctagagttgacgttttaacatgattttaagtaaagaaaccactgaagtttttcccctatattctccagctgattgaaaagtcttttgtttccccactgagctaagtgccaccactttaatatctgaaatgtcaatatttattaatttattccacaaatacttattaagcacttactttgtgccagatcctatgttggagtctgtttctgggccctgtgttctcttgactttgcctctttattgccctggccaggctcctctgtccatgggatttcccaggctaaaatactggaatgggtagcaattgccttctccaggatgctgttattacagtggcttaattgtaatagctttttatgaagtcttgatagccagtattaagtcctcccactttgtttatctttttttaaaaaagtgacttgctacttgctttttgtactctgaataaattttagagacctgggtttgatccctaggttggaaagatcccgcagagaagggaatggcaacccactccagtattcttgcctggagaattccttggacagaagagcctggcaggctatagtccatggtattgcaaagagttggacacaactgagcaactgacatttcctcttgcacttgtcataaattttagaattaactcatcagtgatacaaacagatctcctaggattttggttgaaatttcagtgactgtgtatcagcttagggagaattgatatcttgagaatagtaagttttccatgaacattgtatatatatccatttgattacgtctttttaaatgtcttatataaagatttcctttaacttctttattatgaaatattaacacagaaaactgcataaaacaaatatgcaatttaacaaattgatgtaaacatacacatgaacaccggctagttcaagaaataataaagcattgctggtacctcagaaacctgttccttcctaattgtagcctcttcttttctcccaaaggtaactagaattctgacttttctgttaattgcttccttgctgttgatcataattcaactacctaattatccattttaaaatgatatagtttaattttgctgaatttaatataaatgctgaatttaataaaaatacacaatatgtattttttgtgtatagttgtagcttgttcatattactgtatagtagttaattgcagaatataccacaatttatccattccactgttgagagggagttgagaatttggctatcaatataaagttttataattttctccataaaggtgatgtacctcttttactagatttttttcccattacttcatttttttaatgctatcataaactgtatcttttcaactttttatttatttatttttagaatttaacacatgacttttccttttattcataagttcttagtatacattttggtgtcacaaagtgaactttttattttttaattgtttcagttcagttcagttcagttgctcagtcgtgtccgattctttgcaaccccatgaatcgcagcacgccaggcctccctgtgcatcaccaactcccggagttcactcagactcaggtccatcgagtccgtgatgccatccagccatctcatcctcggtcgtccccttctcctcctgcccccaatccctcccagcatcagagtcttttccaatgagtcaactcttcgcaagaggtggccaaagtactggagtttcagctttagcatcattccttccaaagaaatcccagggctgatctccttcagaatgcgttggctggatctccttgcagtccaagggactctcaagagttttctccaacaccacagttcaaaagcatcaattctttggcattcagctttcttcacagtccaactctcacatccatacatggctgctgaaaaaaccatagccttgactagatggaccttagtcggcaaagtaatgtctctgcttttgaatatactgtctaggctggtcgtaacttttcttccaaggagtaagcgtcttttaatttcatggctgcaatcaccatctgcagtgattttggagcccccaaaaataaagtctgacactgtttccccatctatttcccatgaagtgatgggactagatgccatgatcttcgtttactggtatataaatactacctgctcagctggtggaaaatccacctgcaattcaggagaccctgcttctattcccgggtcgggaagatcccctggagaagggaatggcaacctccttcagtattcttgcctggagaattccatgggttgaggagcctggcaggttacagtccatagggttgcaaagagtcggacacaactgagtgactttcactttacgtcacataaaaattcagtccttttctctttttaaattattattattattgttttggccacaccccatagcatgcaggcttagttcccaataaggggtctgacctattccccctgaagtgagggtgctggcatcctaacactggactgctgggggattctcagtgctgttcttttctatttcagtgtatgtccaaggtccctgaggatctgattctgctattagttgtttgtatgacttcttacctctggtgctttgtttccttgtgttttgtgattttttttaatatgtatttatttggctgcattaggtctttgttgcagcgttcggagtcttctcttgtggcgcacagactccctagttgtggcacgtgggctcagtggttgtggcatgtgaggtgagttgctccatggcgtgtggagtattgggtccctgaccagatattgaacctgcatcccctgcatttcatgggggattcttaaccattggaccgccagggaagtcctcttttgtgatttttgattatgaggtcatattccttgaaactttgtggcctgggatgagataggttcttaggctgaggtttgcttttactttgtaaaagaggtagcttttgagattggctttgtccttcagaggtatgggatggggtgaatttcaaatagtagaaaggcttaatcagagtcactggtgggaagctctgtaggtcttgttgaagaagagttatggttatggatggttatgtttatgaaagagggtagcagggaggattagattgggaaaggaaccctgtaaagttccttgattactgttgttgttcagtcgctcagtcatgtctgattctttgggaccgcatggactgcagcacgccacaccctgtccttcagcatctcctggaccttgctcaaactcatgtccattgagccattgatgccatccaaccatctcgtcctctgtcatccccttctcctcctatgctggcctttaaaattgagtttaaagtccccttgattactgtgctagactttaaaatcttttcttttgtcattgaatattctagaagagggcattggctttttaaagatttttgtgacaccattatggaagatggattggaagagggttagactggatataaatggaactgattaggagatcaaaaaataatccaaatgagagttaatttattatgacaacagatttttattgagcacttgcacaagctgtacagggtcttagttccctgaccagggattgaacttgggtcatggcagcgaacgcttggtatcctaaccactaggccacctgtgaactcctcccctgtcttgttttttgtagaatacagtcagacctgcttctggcctcccagagtaaaataagcagctcaatttctatacaggttgaatgtgatgacaaggaagtacagggttctcaggggagcacttcagagagttaacttaactgagactcggggggtcaaggacagctttctggggaaattaacttttcaattgcaacctaaaggttgcatagaaggttgtgaagagaacagtattctaggccatagcatgtgcaaaggcctaaagatgggagagaatttccttagagaatcgctagtagagttgtgctcagcagattggtacagtgatttcattagaaaaattcagcccctcaaacattcttgtttaattcacgaagtatttttaagaactttatgttggtatccaacctttgaagtaaatggaatttaacccagaagaccctggcatttaggcccagatttcctcactagtttttatttgtttgtcaaattagctaaactgcctggctcttacaagtgctttgaatttggtattccctaggctagagcataaaatattttaggaggattctagagaggtgagcagggaccaaattattttggtttttcaagccaaactaaagaatttgagtttgatcttgtgaataatgaagccactgaagggattttagaggggagtgacatgattcagtttgaattttagatttctctggctgtacaattgagaatagattcacaattgttaaggttaagagtgtgataccagttagaagaatgttgccactatccaagccaaagtgtgtgactggggatggaagtggacaggtttgacagagacattggcggtagtttcaagagaatttgaatgtagcagatgaggagtcaagggtgatgctctgacttttgtctggagcaactgaatggatggtagggagaataggaaacctgggaaaggagcataggagaagtaaggtggtgggtgcggtcaatattatggaggggggataaaagaaccattgtggaggtgtaatgattggcaatggatcagaatggaaggcaagaagggcagagttaaagatgacacttcactaacaaaaacagcatcagagtagttctggaagttcagtttgaatgcctctaggctctcaacagtcagctcctggtcttgtttttgttgactgtatagagtttctccatctttggctgcatagaatataatcaatctgatttcggtgttgaccatctggtgatgtccatgtgtagagtcttctcttgtgttgttggaagagggtgtttgctacgaccagtgcattttcttggcaaaattctattagtctttgccctgcttcattccgcattccaaggccaaatttgcctgttactccaggtgtttcttgacttcctacttttgcatttcagtcccctataatgaaaaggacatcttttttgggtgttagttctaaaaggtcttgtaggtcttcataaaactgttcaacttcagcttcttcagcatcactggttggggcatagatttggataactgtgatattgaatggtttgccttggagacgaacagagatcattctgtcatttttgagattgcatccaagtactgtatttcagactctcttgtcgactaaggtccgtctagttgaggctacggtttttcctgtggtcatgtatggatgtgagagttggactgtgaagaaggctgagcaccaaagaattgatgcttgtgaactgtggtgttggagaagactcttgaaagtctcttggactgcaaggagatccaaccagtccattctgaaggagatcaaccttgggatttctttggaaggaatgatgctaaagctgaaactccagtactttggccacctcatgagaagagttgactcattggaaaaaactctgctgctgggagggattgggggcaggaggaaaagggacgaccgaggatgagatggctggatggcatcacggactcgatggacatgagtctgagtgaactctgggagatggtgatggacagggaggcctagcgtgctgcaattcatggggtcacaaagagtcggacacgactgagcgacttaactgaactgaggctctcaacaagttgttatgtccagtagaatttgaagtgcctataggatttgtgagcggaactggctgggaagctattggaattgtgaatctgaagcttagaacatcaagatggaatgaaagtctgggcagtcagctatctagaaggtgatcaccaaagcagagctttgacgacattgtcaagagtgtaaagggcttagtatagtgaagacaatttagtatttggaactagtacttgctgctttcactatgggtttgtgtttttttttttttttaataaaagatttatttatttatgtctgtgctcggtctcctcctgctcttgggctttctctagttgtagtgagcaggggctgctcttcattgcagctcacaggcttctcaggtggcttctcatgttgctgagcacagccctaggctcgaaggcttcagtagccgtggagcttgggcttaattgctttgtggctcgaggggtcttcgtggaccagggatcgaacctgagtcccctgcattagaagcagattcttaactagtggaccaccagggaagcccctgtttttcattcttaatattcgtcaataaaggaggattaaatgagagtcagatatctctccatcagtatctagagccagacctctgggttcttattccagcttactctctgtgtaaccttgggcaaattatgtttagcccttgtctgctgtagtttccttactgcagagtgaagctaataatactatgaactttaaaaggttgtctcatactggatagcaataaagtgcctggttggcactttattaaacaaataaaacagtggctggcacagagtaaacaattgctgttagctgttttgaaaatgctttataaactgtaaaaatatgggttattagaaaagaagagggttatctttgaaggagacccacctttaagggatgagaggaagagaacttttatttttattaaattttttggctgtaccaacacagcatgtggaacttccccaaccagggattgaacccatgttccctgcagtggaaattcagaatcttaaccattggaccaccagggaagtcttttttaaaaagaagacaggctgaatcagaatcttgggatagccaggaaattactatgtcaaagaagttttttttttttttaatatttatttatttggcctcccccgggcccggttacagcatgctggatctgcattgtggcaggtgggatctttagttcaggcatgcaaactcttatttgcagcatgtgggatctagttccccgaccagggatcgaacttaggccccatgtcttgggaacagagtcttagcctctggacccccaggaaagtccctcaaggaagtttttatcgggaggatgtgatcagaattattggtgtgatgatgaattataaaggatttaccatctatttcactcagtactagtcaccccttcttcttgaactcttagagccgtttggcccatagttatatattgttacatttaatattgaagtaataatttgtaaaacaatttacaaagagatttaataatctcatccacttctcacaactctcctgtgaagtagatgttattctctttggtaaatgaggaaattgaggcccaagcaatagacttgccaccacagttaaaaacttagaacagttttttagatttaaaaaatgggggaaaaaaatagacttgcctaagcaatagagcttgagttgcagtctaggttgtgagatactatcttttgataatcatgtttgcttaactagcttgtgagtgtcctgaggcctgaatctcatcagtgagttctttttgtcctgtatagctcagtgccgagtgaagactggccatgctcaaggctaacatgcttctctcccctctgtcttccagcgccctcacaaagccaatgctgaggagatgaccaagtaccacagtgatgactacattaaattcttacgctccatccgcccagataacatgtccgagtacagcaagcagatgcagagatgtgagtgcgttctgctccctctctactctcaagcccccgttaggcccccttctagttggagagactcacgctcccttcgcttgtatcccccgttcaggtgatacctgatttcccctgcttcctaagggcaccacagtgctgcttttatctcaggactggctttgtttcctgattgtaaggaatagagactgaacattgtccagttaggttcacaacaccatcccccccaaaccatgattgttgtaatggaaaaagcactggtctgggagagggagacaggagatacaggtcccagctctgactcttaactgactgtcaagtcacttctcagatttttcttttgtgaagtggactggatggcatcccatgcagctgtaactgctctgactatgtgagtgttagttgagaatttagcagctacttaggacagactctagatgatgtcatctttgagttgaggtgattctgcccctgccccctggaacttaaaaccagatcatttcggaagccgcactcagcttgtaggaattacggtgattgttttagttgtggggaaaaatatgttcagatttggaaagaaactatcatacatgatttctcccttgtgttattttataaattatcatgtagcacctaagatctcgtaataaaacagtatagcggtattgtctagaagttttgagtagtttatgatagtttattttggaataccaggaaacctatgacacttccttgttactactggccacaaggtagtctgattcctaaggcagaaatttatttgttacaataattgtgcactgctaatgattacagaactacagagacctttttggaagcattaagcttctttaccacccacaactccaggaccagctgccccatctaaggtatttactgtctaaattggcagggtcttacttcatttcagcctgtctcaaggtgagacagattcattcctttgctcttgatgcctttagggggttccagaacttatttaggccagtgatcaggctctgctctcagcagagagggctctcattagtgaagcagcttggtttcgcagcagaagaatgagctctgatgtcttagtttgaaacctgtggctctcccacttagctatgtgttcttgaggaagtcccctagcctctttgagccttgttttctcctctttaaaaggaagacggtagtggctgttctataacggagtttggggggataagtaagataatgtatttaaagcaccaactgtcagtgaaagtgaatagtagcttttgctcttatgacttacagcttttattattttcaaatcttccaaggcagacagcatattaggcccttgggtgtgcagtagtttggttctggctcccagtttgctccttttttcccaaaaccagcattctaaagttgtacattaaaaaaattaggtctgagattttctatcattggaggtggaggtaagaaggatgaggctttctaaggacttcagggtacttactgacaagagccagagagatgccacttagtgcagtgctttataaccggaggtgtctgtacagagagaatgacagggatgacgagctaagctctgtttcagtattttccaacacctaccctaggaagttgggctttcctggtggctcagtggtaaagaatccacctgctaacacagggggcctggggttcagtccttaggttggaaagatcccttgagaaggaaatggctacccactgcagtgttcttgccagggaaatcatgtcccaagggcatgggagcctggaggaccacagtccatggggtcacaagagtgtgacatggcttagcaactaaaccaccaccatgaacctgagaagtcatacctctaagaagaccaaataagtcagatttccttgctcttggctagaatgtaatttaaatgctttgtgttcactttgagactttgagaatctaaattagaagttctgatctaatatttaataatgggaacataaatgcattttggtggagggcagatagtctatcaaaatatgaggctcatggtagaaacatgataaaaggaacttgtgctaataaaatgtggaggcatgcttttccattttgtaaacctacagaggtgaaatgactttcccagcaagatagtggtagaatggagaatggaacttgagtttcctgactctggagtattttaatttatctatttattttggctgcgctatgcggcatgtgggattttagttcccggaccagggatcgaacccacatcctccacactggaagcatggagtcttaactgctgggtgccagggaagtccctggagtattttaaaacaggttgcaaataaaatatttcaggcacacaaaaaagtataaaaataatgtaatgaacatccatgttcctgtaatcagcctaagaaagacaatattaccaatactgaagccccggacacctctatttgatcacatgcccttttcttctactcccctctccaccccgttaccaccgccgccgccactaaaggagtaagcactatcctgggggcagtgtttaatcccatacacctctctctgtggtaggttttttactgccttctcaacctacatctgctcccatatctctcacccactattgctccccgtcagtctaaagccaggctacgaatgagaaaagtatagtgggaagagagaaaacctatagaaaagtcctctggtctcacagattagtccaggtgagggtctgctctcccattttaccccttttctgtctgtaatcacacagctcctgggaataatggactggccatttgagctgcatattgatgtggggcctgaaggaaaatattttttctcatttctaaaagactgatttcttcccacgggggctccacatcaaacaggagtataagcaaagctagaaacccagacaggccaaacccactgaaggaggaagccgccagagagggaaatcaattgccaatggataaataaatagcctggcctgagggaccaaagttcttattgacacagcctcccaatgtttacctgggaagtgagcgagagggccaccttctgcttgcccccttatgcataccatccttcctcatagcactgctcttggcagggctacagatcagagcaccctcccaagtttaggacagtactaggattggtaactggtggctgttgcaaaccttgagcttcagctgtgtgtcaacaggtcaccacagtctaagctgggctctcctaccctcctcaccctagggctccctctctttgctccaattttattgataatagtggatgcagtgtgaaggctgaggcaagcagccttgcctctaacttctgggtatcattgatatctcagcagtttccttttttgtgagcggagacttggagctataaagttcctctctagctctgagtctgtagagttcaaatgtgtttcccttcctgtctttttcattttatttgcattattgtttgcatgtgtttccacattatgtgttagtttgtacttttacccttttaggcctgaaataattttcctccaattgtcacttgttgtagtagaaagagcactgaactgtgggagtcaagacacctggactctggttctaccactgcctggttatatagccttgggcaagtcagttaacttcacatctgtttgttcctctgcacagtggggttgatattggtcctgtccatcttttatggagttgttaggcagattcaatgagattatgtatgtgaaattactggggaaaagacgagagtatattttcgtgggcttttaggacggacagaccaatccttgaatactgcctctgccatttactggcagttacctctttgagcctgtttccccacttataaaacaggaccaaatcctacctcagaaagttgtgtgaacatagatgacaccaagtatttaaagcacttggcatggtgtccggcatgttgttaagcatcaatggaggatagtataggtctctgttctttgcatgcttgttgacccactggagtaagatccaggaacaaacccaggctggaataagaggctaaatttttctcccttaggagtgaaacaacattttccaagtacttacttgctgaatgcttccccatgtaaggtttctgttaatcttctcaagaattaggtgaggtggatatcattgttgcttgttaaagataatgagccaaagctcaaggaagttaaatgactagacctagtcccacagtcagtaagcaggagggcctggacaagaacccaagccttctgaatccaaatgctgtgttttttctatcagctcataaatatgtaaacaaaaccaaaaggaaattgtggaaactaaccttttcgtgttttttcaagtcaacgtcggtgaggactgtccggtatttgatggcctgtttgagttctgtcagctgtctactggtggctctgtgggtaaggaatatacccttcattaagggctaatctgggctgtaccaatgaggtctgtcttttaggccactgtcctagtgaggctgacctgtgaccatgtaaaatggtcctgtgggtttttacgttaggtccttaaaatgttattctgcttcagtctgaggccaggttcaatctgacatggtatagatatgtgtcctagcctgtcctttcctactaagacatcctgtatacaggaactccctgcagacctcatggggttgttgaaatgctgaacataaaagtaatttgtgaactgcaaagtgctgtaaaaataggaagtgtcatcatctgtgtcttacaaaagagcatggtaattacctttagaggtcagaaacacttcccacgtatctcccacttccattagtaatatctacgttatctctgggatcaccctaccatttcttaacaaatatttatttttctgtgatcattgttttttctcctcccctctccctaccacctcccaatataatctcagaaaacaaagaagtatacagaggaaaaaaactgactgcaatcacactgtcatggataaccatcattaccattttggtgtttgtacatccatgctttttctttgtgcatgtatccagacaaaacatatactcatctatattttacaaaaatgtgtatgtatagttttgtgcctccctactacattttttacttagtaaattttttttttttttttccggtcatgccatgtggcttgcagtatcttagttcctgaactagggattgaacctgggcccatggcagtgaaagtgcggagtctaaccgctggactgccagggaagtccctacctagtaaatctttgaaatttagctgtaataaggtttagcatgatatccagtggctacatgattattctgttatagaccaacctcagttgatataattagtccactcaagttgctgtatgttggtgttttttttgttttttctacaccatgcagcttgaaggatctatcttagttccctggccagggagtgaacttgagcccttggcagtggaagcatggagtcctaaccactgcactgccaggggattccctcacgtttttattgctgttaaagtcgtactgccgcaaaggcatctgcacacatggtgtgtatttttctcacttcttcttggacctatttgtacttcaagcctctgtctactacatttggtatcttcaaaatattttgaccgtgaaccacagtaagaaatacatttacacttaaaatccaggttatggacgcacttgcacacacacatcctctcttgctctgcagctagtttcacaaaagagtagttacctttactgttactctgctatttttattctatagtctatctcatttaaaaaaaaaaaaatatatatatatatatatacacactatccatagcccactaaaccaattttaaggcctattagtgagttttaccactttcagtttgaaaaacaggttttttagagtagccaatattgtgtttattcccattggagtagacagagggagagggttagctggtgaattgtatagttcagctgttaaataggcaggtcctatctctcactgggttcccatggttttttggggaaaggagagagagggactttgtgacaggcttgtgttctttcttccggtgcccagcaagtgccgtgaaacttaataagcagcagacggacatcgctgtgaattgggctgggggcctacaccatgcaaagaagtccgaggcatctggcttctgttacgtcaatgatatcgtcttggccatcctggaactgctaaagtatgccttcctggccttgtctcggaggagcaccttaggccaggtccccactccctctcccccgggcttgcctccctagtttgcctttcctagcggcgtgccggctaggatgtgttcggtgagtgtctctggccatcctctccttgacgaggccttgattggatctgagcccacggcaagatcaggggcaggtgctgctcagatcctgcctccagaatgtctctgtgtggctggagttgaccctggctgtagagtaggaagatcggacttggtcggcttggtcaggcctctggagacaccctgccgctcttccaccttccttcagccagtttccacgtctctggtgcttagagatacctgagggaggcagccagcccggtaagctgggacctggcgcccttggcgcgtcccactcccaaagagcccccagaaccccctgacccccttctgatcctaggtatcaccagagggtgctgtatattgacattgatattcaccacggcgatggcgtggaagaggccttctataccacagaccgagtcatgactgtgtcctttcataaatatggagagtacttcccaggaactggggacctacgggtgagaactcccttcagggaccagccagctcaccctcagctgccagctctaactctcctgtctcataccaccaaaacccacttcctgcctcttctgccatttggagaccacacacctgccacgctctttccctttcttgttctggaggaagggaatgatggagcatacagggttgtgagggatgggtgcctcctgactcattgcatttcctcctggccacagctgagttgcattacactgttcagatgtcctagacagcttgaattttaggctagaaacatcaggtactctcccacgggctaggaattgggacctttgtgaaccaatttaagggtatttttaggttaccttcccctttgaccatctgactgaaggctgctctctccccagaaatgtacatgagattttatgtttgatattgaatagttaatagacacctcctcctactgaagcccatccatggacctcaggataagaatccctggaagctaattcattaaactcttctgcttgtgttagcatggatacaatgaaaccatccactttgtcatcccagtggcccttgggtgaaaaagtggcattaagtcagtttgctatggcaagcgttagaataactgagcatttacaattttgaagaattcttccctttctgcttgctttccacacctccgtagagctgagggtgggggagcagaggagtgagcagtaaagtgttctggaaaagcgttgctgtggggtgggtgttaattctgtggtccagcccccacctttaacccagtcatgctgtgggggtggtatattcagcctctggccccagaaatgattctcagcctgagtgcagactcagtggtttgtccagagacgggagctagagttgtcccgccagtgaggggaatggtgctaacttgctctgtccctggcccacctcatggacccagcttctgtctcttagaaccactgcttctttccttagccttccagcccctacccttgagcttccttctagcttcatctttcagttttactttaatgtccttcttgattaggatattggagctggcaaaggcaagtattatgctgttaactaccctctccgagatgggattgacgacgagtcctatgaggccattttcaagccggtaagtattatgctgttaactaccctctccgagatgggattgacgacaagtcctataaggccattttcaagccactgggctgtaaatgggattggtctaagggaggggtagcaaaagcacctcaggggtctctccccaagagaagctggctggaaatgagacgggtttgaaccctggattacatgctatatggccagttgagaggacaaaatttctccaagtatatatctgaatcttttatccaacactgttgttatacaggaatgtctaaggcatgatctgtgtccttgaagaccttacagtccatggtgtgggaggcaggcacatccccaaatacatgtggttaatgctgtttttgagggatgaccagaggaacgagagaaaaactgctgcctgagctggggaaagggtagtcagaggtgatttcacagaggtggtgacatttgagcaggactctgagaaacgaggagttactcatgtgaagaaggaggcgggtggcgggtggcagagggaacggctccagcagaggcgccaatatgtagcatgtaggcctgtatgatgtggggaggggtcttgaaggatgtggtagaaaatatttgttgggttagtatttcaaagggagctttgaaggccatgctgaggagttaaatcttcacctgtgagcaacaaggaaccagccattaccagagtagtaacctggttaggtcacatagtagtttagcaaacaccaggtgcccactattgctgcataccttgtagtaagggtggcagagaagcctgagttgcagtctctgtcctcagtcacattggaatctggttgtgagaatgagatatacaaaagtgaggtggctctttgtagtgtgaggctcaaagtctgtaggaccaaatgcatagagcagatgcagctaagggtcagaagagcttcttggagccagtggtcttggacctagagagcagggaaggatgtggggaattattaaggaggctgttttaggctcaggattactagtgctagaagactcctggaaaactgaacaaagtagggaaacgggaagcccagattggctctccattttctctactcctcagcctggggaagagtgaaaaggcaggagtggcaaataaggaacagaagaaagtgttgcacccacacttttcagcctgaaccccagaagcttttcttgaggctggtggtgaccaggttgtgtcctttcaggtcatgtccaaagtaatggagatgttccagcccagtgcagttgtcttgcagtgtggctctgactccctgtctggggatcggttaggctgcttcaatttgaccatcaaaggtgagtccaggtagcatagagatgggcgggcagggtcctgctgggtgctcctgtaacttggcaccccttctcccaccaaagggcatgccaagtgtgtggaatttgtgaagagcttcaacctgcctatgctgatgctgggaggaggtggctacaccatccgcaatgttgcccggtgctggacatacgaaacagctgtggccctggacacggagatccctaatggtaatggctccagggccagacgggtccgggcagtgcgtgagctcctgtgtccttgagctcacaccccctacccgctggctctgcagcatctccttttcagactctgattctgttgctagcctcttgtgattttcagaccatagccatcagttttttcccgagtcctttagctgcccctgtccattctcccttgacttttggtctggacagaattatcagtagttatagctttggaattcatactctgtagggtaattggggtagtgaggggtagagtactctcagtgaatattacctaaatttttctaaaccaggggcgtcagccttctccttatacacaggcactcacatacacatacccagacaccaccggtgtgaaccctggagaatggctttggcttttaaacacttgaaatcctataggatttcccaagtctcaccccatcttaaaggcatgcttctgtttgatagctgggctaacaggcccagataaacctgcaaatgcttttctcagggttccatggtggccagatctcttaactctctcacctgcccccaccccaattagagcttccatacaacgactacttcgaatactttggaccagatttcaaacttcatatcagtccttcaaatatgactaaccagaacactaatgagtacctggaaaagatcaagtgagtatacccccaccccacacacccctaattgaacatttcaagctccggttggttcctgatcagagcccagccaacctctctaccattggccatagacagcggctgtttgagaacctgagaatgctgccccatgcacctggggtccagatgcaggccatccctgaggacgccattccagaggagagtggcgatgaggatgaagaagaccctgacaaacgcatctcaagtaagacccaaacttcgggggcctctgcctccctactccgtaggcccttgtccaagctgcgcaactgttgagaatcccagtgctcgtacctgtaggaataatttagagtccaggtccctttccctcggtgtcttttgcgggaacgtgcagaaaagcattctttgctgagaaagaatctgctctctcactggagtgtcccattcattacctcccagtctgttcctcggacaaacgaattgcctgtgaggaagagttctccgactctgacgaggagggagaaggcgggcgcaagaactcttccaacttcaagaaagccaagagagtcaaaacagaggatgagaaagagaaagatccggaagagaagaaaggtgagtttggttgggccaggacttgggtcttgagccccaggccctggaagatgaatttatgtagggcactgtgggggtggggagctgacttggcactgtcagctccttggggtactccctcagctacatgggcctttctgtggttcctagaagtggcccacagaacagctacgtgggcctttctgtggttcctagaagtggcccacagaagaatgaaactcaattcgtcatcctcactggctgatagagccctgccaggttccagagccagggacatgcctgggctctccttggtcaggcggggctctcacataccacccaagcctcccagtgcttcacccgtttcccagggggctgcctccacccactgggtttaggctttagcaggctgggaaacctgtccaacctgtttgttctctacaggtctagctgggagggcttgggacgtacttttctctccactgagctgtgatgttgggaaggggtttcaggagatcccatgagtctttccgggggcctgcccttgaccatccctgcattcttatgttctagaagtcacagaagaggagaaaaccaaggaagagaagcaagaagccaaagggtaaggaaagaaatgtctgtctgctccctggcattggagcaccagcccctttgtcccaccacaccaagagggaaagcacagggacagctggtccagcttacaaaggcctctttcagggaccagtctgttggtttctgcagttctaggcagagctcggaagctctagccttcagcagtcacctgggcagccaagggcctgaggaagtcactgtgcccttcctttttccaaggcctctagggtgggttatctaatgccagtctctgctctctccacagggtcaaggaagaggtcaagttggcctgaagagacctctccagttctggcttcttgccaaatccccacctttatcccacagcccttcagattttatattttctatttctctgtgtatttatataaaaatatattaaatataaatatccccagggactagacaggaaccagggccctgaggtcagggcacacattacttttctagtagttgccttgcaacccatccctccaaactcttgaaccctaatgggtactgggtaaaagggatccgcttaagcagccataggacaaaatcttgaagtgcctgcttcatagctttgaaaaggtgcccttgctgagcatttgagaaggggtggctgggtcttcagggactccctgttgtttttaggttcttaaggtaacatcagccatttttaggttggttctgttctcatgcctgccctgtctgtcttcccccaattctccaggtgaagattggtagtctagtttccattttgagatactatattcatttttgtgagaatctttgt

SEQ ID NO: 213 - DNA, 8236 bp, Hippotragus leucophaeus
  source 1..8236: mol_type = genomic DNA
agcacatgtgactacaccgctacctattgtagtgggcaacgcagacgagaacattcgcaccactgcagaaaacggacagcaagttgtgctcagcacggaaggcctcagggacctttatggggctggtatctgttctgatggtgaccatgctgtgccaactgataactttttgaagtagcacctgagtacacttgcatttgagtttatagcagaacattagagtttatggcacattcctcagaagaactcaaaacctaacactccttgggccccaggccccaagtcaactcatagctctacctatatagccaagggcaatgactgtatttacatgaacatatccctgtgccacaactgtcctttctcctgccatcttctccatgaccacaactgaaaggatttcacaacaggtgtgttaccactcatcccccaaagttaagctcaggtaggatgccaacaatgaacccatcagaatgtatctacaaaaagtaaaatcacctatgatttagctctaaataaaaggccacaacccttagaaacaatacaatttttataaaaagacaaatgtacatatttacatacatgtacatgtgtggtcacacatgacttagtggtcagatgatatttccaattttaaatcacaccaaggcgctcacacttgcctccctgggcctgctgggggcttctggggcctgcctgagggggcacgtgggtgcagggcaaggcacagtataaataaatgcaaaggccaagagcttgggaaaacgttagtgtacacctctgatcagaaacgtggcaaggtccacaagaaaagtgccaggttttttcacaagcccttcagcctaggcagggagcagggtagagctcctctgaggcagagggggcactgtcccacagggaccccattcttccttcacatttcactggtgttagaacagtccccagggctcagctaggaagggaagcggttactttgggaacaggattcacttagtgcaattgtctcttagtgcagagccagccctggagttggtgccatgttttctgaggtcactggtccgttctctcgggccagctcaggaatagcaaaaccctctccaggcagtggggctcagaggggaaagctggaggctgactcctgtctgagactgccacctgacacaccagtctcagaaccccatcttcccaggaggcagggccagctttaccccacaagatgagtccagaccctgccctgccggactgcaagaggccactgtcccgaggcggaaagacccatccttggtcagcagtggggtcacacttcatcatatcaaggggccacaggattcctgcttctttgcaccacagccaccatgatgccaggccctgttgcctaaaggagtcaaagggggtcaggggcccatctatggtgcacaaggaatggcctggatggagggcagcctgactggggtgagcaggctgtccaaccagctgggatccatgttcttcatctctgatgatatcaggccaatataccctagaagatataacgaaggttgtgtgaggactggggggtgaggaggcaggtgttttcccctaccccaccaaccctccagcccattcctggaaggcacatacacagcagctcctgtgtcaacccctcagcagcctcatcttaggcaaacctgagggcctaggagccacagccagtctgcaatctgtctgtacccagatgaatttaagaagaatgctttacctctgctgctatctcgtcctgcccccaagtctcccccaccacctccatgggtttcccatctttgagaaaccatatggatccagggtcttcttacccccagggctgtcaacttctggctcctccttgcaactgaactctccatagacagaggtgggctgggccccgggttcattaagcaggtaccccttcccatccacgcttgtctgctgccaccctgtttgctccaagagctggggacagataaataagaagccatcagctcacttccagtacagactcaccctctggccctgcccccattgagccaaagcttctcagccaggatcaggtccttggctattttcatattctcagatggatacatatgtggagtgcaattaggaaagaggcccagaggtgagggtctgccctgggaccctgggctaacattcccacatctaccttctggcatagaacctccaagacctccctctctatagggtaaggacataccaactgggagggtagcttacagcaatggttaacatgctaagaaaagatgccttgaaatttcagctagaattagggaattatccccatatctccattttctgtgctgaaggaacacagcctgggtatagctactacaaaaacttttttgtatttattttaaaacctgaagcagaaaaaaacctagagaataatttgcttaaaaaaaaaaaaaaaagccatcatgttatagatcccaaagggtgattattgaaacctgatgtgcatttcccaaactaacaggactggggcatgttggggcggaggacgcgggccagggaccagcactgatgggagctgagtcagagctatctgaggcctgctttaggacagcatgtcagaaacccagcctccctcctcccctcattcccatcagccaaaaaggtcagtggtccccaaccacatggacgtgacgcttgtcggactatgcaagccaacaggtcacaccagcagcagctgctgcctatcctccagtttggaagtcctcactgagaagtagccacctctaaagggcaccaaaggaggaagaaaggggcttttaccttcatgatgtcctcagttaatttcccttcctcgtcctcatctgttgcagctgtggatggggaacagcagagaggttagctgaggtcagccaggctcaccctgaagtgctagcccacccggtccccctgcctcttcccacacgcacacacacacactggcctcccagcagatgtctgcctgccatgaagattacagagcaaaacgctgtcctggtgacagcctcttgaaccctggagccacacctcttcccacctcttccctctcctttccagcccaccagtcagctcagtgccaagtggagttctgagcgtcttttctccctcaggaaacccctccttggaccccaataggaaggccaggccccagaagcacgaaccttcagaggtggagggcatgggggacacctgaaagttgtacaggtcgctggtgctgtctggcacaatttccactggaatgggccagttagggagagtgctgctgacgccacacggtgacagcgcttcaggacaacagaaaccgagggtcagagctggtgctgccttagtttgccaggatacccagcaccccctgcccccactcatagcctgctccaacaggccaccgtccacaagctcagcgcctgctagatccaagagtaagagccttcccaccagtctacacggtcccctgacagacccagccctcctcacctggagtgagagtccgttcgatgtctaggtcctgcgccatgtagctgcgaactgtgtagttgctgtggtcatcaggcaaggtggagctactgagtccatcagagaaggtatcggggctgtattccccatacggctgtagaaggagaaagatgattaggcccaggcttgctgtggcactcctttcactacccaccctgaccctcaggagaccaaaggctaactgcttaggatcacactcaccttcttcttggccttgctcctagcatctcggctggacttggactttctctctgtggggcaaacaggctgtcagcccagccctggtagaggcaagcatgctggccccagctgcccttcctcctccttccctctctccctgagggcttccccaggacccagaggcctttgggtacctttcctctggctcttggtgaggggtgggagcatccggtacacccgcacagctgaactgcccttgttcctgctctggtccttcacctcctcaatatctggcagtgagttcatggcgcagcgaaagtttgccttccaggtcttgggatccggctccttttcccctgctttgtatcggcctagttggcaggaaagggggagaggatcatcagggctataggtgggaacccttatttgtgccctggctcagaaggacaaagacaagggtatccctaaagcttgcatgttgccagagatccacaatgatcaaaccagcaggtattcctggatgacactggtgcaggccctgggcttctcaaacgcccagacttgggcatttgatacacccagcaagcctctgggaaagccctacccagaagcactagaaagcccaagcccaaagtgctacctttgtcacagatcaaggcagtctctctttggctgtcagcagccagaaagaagggactggtgcttatctgatcgttccaaacatgggagaggacacagagtaggcaacaaagaatatttactgatagggggactgagtggtccgagatgggccaagagccccatccttgaaggataaaaggaggctgccaaccagatgggcccaggaccattagtcaacatcaagaaaaaggaagacctgaatctttttcagtgtccatgcttgccactgcttttgccagggagaactttaattcagccacaaactccacgaagccatactttttaagattttggctttataaattcctttgtgaacttgctgaaatgatgaacctctccccccaaaacacaggcctgctccctgcccaccctgaattatgtacatctcagggaactcagagaccccagtgaagatcctctgtgttaacagaagtgcctccctttctctctttccagctcctcttaagctagagtccagcacactcacctgtgtgaatggcccagctccgaaacagacaggcatctttgttgatgtcccagccatgcttcgcagcgtgcttccatgggatctggaagatcatctcctcctatatagcacacgtacacacaaagctgtgtcagctcagagaccacaggtttttggccttaatctgcccagcccccgaggtctgggaaaagactgacttccctttttcaccctgacatctggctggggttgacccaccccaacaatggcctaaacagactggtcatccctctggatctctcagaagaggctctgggttctgatgagctatggcatcatcaggtcagcaaagacctccttctgctcattacagatgtgctaggacccatacagaggacccctggatgcttctctctggcttgtcagcaccaacatggaagtgagaactcggtccattatatggggcttctcagaacaactgtgaacactggctcctacaaagggagttctggtcatttacctgcaggagcccaggaccagacttggatgatgactacctgtgtgaccctggcattgacactgtacctctttatccctcactggtttccatgaaatgggggaaaaaaaaacaacaccacagtaacaaatataaaagctaagttcccactgttatcattactggtggttaacagtatggatttttgaggtgggttgctcaggttcaaatcttggctccatcgctttttgtgtgatctcattatctacctctcagtgcctgtttcctcatctgaaaatggagatattagtaaaatcttcctcgcatggctactttgaggattaaatgacacaatgtaagtaacatgcttaacatggtgccatgctcattcctagtaagtgagcagattaagcattagctattattattagcactactaagccttcagggtctgttctttttgcaacagcaagaggcctcttgggtctggacaactggtgcaaggttaattcttggctcacctgctgggtcagccacctcttcctgccagcagtgcccacttctctgtctcctatctacccaagtggagccctctagaaggctgtgtgtgcctgtagaggtctccctcagtacaggccagaactctggctctgcagatgctgggagaatcttgctgctggaaaactgttaagtggcctcaggtggatgccccatgcatacctcaagaagggaggtgggcagaaggcagccagtagagccctgcctgggctgggtcttatacactccctgcaggatccactgggaaatacatctacctactccttatcacttccctttttgaactgcatctgaagtgttggacccccgaagaacataggttaaaacagtggcagaaaaatccaaacagtaacactcactttattaatccagatcagccctgggatttggttggaattaatctgcatctctagccagggtctcatgcgcatccgagtgatgggcatgttggctgtgaagagaagacagaaggctcctgtttggagtctgttgagcagtccctggccactacccagccccaccccaggtcattcagttaccctcccctgccctcatctagataccaagtactacaatcatgcagaaggggactttctctctaataaaacctccctccaaatcttttcagcatcttgagcaacacactccctccctcagcccctcctagacagtcttgggaggggacagccatgccaagtgatactctgaagatttatgttaaggaaaagagacaaaacacacagatatctaaatactagaacttactccccaaattcaaattgtttggggagagaggggcttcttttgcttgatgccaagaaatttccctctttgagctgttgtcactagccgtgcaccttccctaatggacagtcaccctgcatcctcgtcaccaccaccccccaatctatcccttgcctgcctgacagcctcagtgccaaggcccgtacgctaaacctttcggcctggttgccctccttgggcaaagtggcccaaagaacacctgtggcgcctcttcccgctgttccgggaggtcctccaaccacccagcgcagccggccccagcctccgccacctgcagagacagcctgaaacctgggggctgggcctgagctggaaccgccgaaaagcgggcgcagggagcaaagggcgcccacgctttgatatacagtcgaatcccccgcacagcccttggatgcgcgcaaccaacacagagggccacccagaggccgccagcggctctggcacggacaacctcggcggggtggggggtccacgccgctgctcgccctccccgcgcagctgcttgcggctcctcgggcgccctccgagcccgcgcgggggccccggcaacgccgcgcacccgtcactctcccggcaagggtgttagtcccccacttcctggtgccccgagcgcgcctttatccgaagccaccggtgccccttgcggcgaaggcgagctcacctcgacagcaagcgctacccgacggcagcaaccgagggtcccggcgaggactgcttttgccggcgctaggagcgcgattccagtgggaacggggagacggcagaggatgcccgggtcgcggagcctctgggcacggctggccttgacttggcacggctggccttgacttggcacggctctcgctggcctctgctagccagacttgggcgcacgtcctgcctcgacgaaggagtggcgcgctctgcctgaaccgcggcgccgcggagaatctaaacacttagcgggattcccccagcccgggccgggccccgcctcctaaagagccgagaggacgcccattggccagcgccgcctcatcatttcggggaaatcaggctgttgtagagctagcggcgaaggggaagtacagggcggctgcccctccccaccccctccggcctggcgccgccgccccggggcgaccgcgggcccgccccgccggctcccactccacccccataccagcgcaccagcgctcctggaaagtcgaacgcccccggcccgcagttgctcccctcactcggcgctcacccggcctgctagctcctgaggccatctccttgctcttctttcctggggatgccccgggatctctgtcttcccagccccggtgagggggtcaccccggcacctgccgtcctcttcagagtggacgcgaggattgagtccttgaaaaccaacctgcttcctcaagcccgttaatgggtgtcaagcagggagggtttcggccttcaaaccttcgaggggtggcccacctccgggggttcaccttacccggggaagtaacggaaagcctaccctggcgaggggctgc

SEQ ID NO: 214 - DNA, 81039 bp, Hippotragus leucophaeus
  source 1..81039: mol_type = genomic DNA
caccagcggcgtccagcctcctccctcgggagcttgctcgaggggcggtggcggacctttattgtctggggagcatctgccaggtggcgggccgatcccttgatgtgcgcgtggtgcccagcttcacaaagcgcgcggcgggcagcaccactctcgtccgggaacatcaccgcggaggagaggtggagagatgtgtgggctctggggtcgtgagcgcggggcgggggccgacgtgctcaaccactccccgcgggctcagtccgccgggatcagcgcctcgaaagaaccggggtcagacaccgccgccagggagccagacccagacccaggcgaggaggggcgcccagaaggggcgtggccgtcgcacagggggagggcgctgggaggagcggccgcggcttggcgctcgcggctctgggggctcggctttgccgcgctcccggcactcgggctagagccggaacgtggaacagagctccggtcccagcgcagccaccgcgatgagaggcgctcgcggcgcctgggatttcctcttcgttctgctgctcctgctcctcgtccagacaggtgggagggcgctgcgggtactcgggccgcgcctcccccctccccccggcgcagcccgtgccccgttagggtccgaatacgttggggtggctggggagaggtggctgccggtgcgtttcagtttcgggaagattcggggcggccccgggactctactgcgccctgccctgctcacctgcgtcgggagccctcctcagccggtgggggtggggggaggcgctgagctgcgagtctttcaggaaggcgggcggcgaggggcttacgctgagggcagcgggttgtgtgtgagtttagggctgcttttgtgaggagggcgagctgagcggggtcagaggcgggcggcgagggagttctcacgcagcgcgttatctccgccggctgaggcgcggcggttgcatccttttgttaaaagttgtgcgtgagaaccggcccgcaggttctcagccgcgccgagggcgaagttgtaggagagccttttctttgctctgcagcggttgccttccaaaccgcggcgctctttgtgccccagggccggggacgcacccgctgcctcgtctgttcaggcgccacgctggaccggagtcgaaggctgcggcgtcctcgggttcccgggttatgcctttagcaggggggagcgtgcggctctgtggccgcgaacctggaggtgcggctccggggacaacttgggcaggggtgtggaaagcaggcgctaggctgcagactttgcttttgtatatcccgtgcccgaggctcgccgcgtgccgtttctttcctgcaacgcgcctcggagtggctggtggctgcgtttgctgcctgctcccgggggagacagggatggcgcgcctagacattgcggtccccgaccccaaccgccgtccacgcccggcctgagcgcccggccaggtcgacggggctctgccagccccttcggtgtctgtgacctctaatcgcaggtccctgttttctttgggaatattgagaatcgcaacacagcctctcgcgtgatttacttaacggctgcccgaggtggggggtgggagatggagtggaactttcagcaaatcttacttaaatcttaaagctgttgtgaaaatcggttatatctgcgtgggaacttgggtcttcaggtggaggaggaggatttgtagactcctggaagccctcaatcacattcttgctctctttttttctgggtgtctctggtgcgcaagcgagtgcaagtcgcccagctaaccccctgaagctctactatttcccacgtcatttttttttttaacccataaggctaacttgatgatgttaggatagaaagtgagtctgaactggaattcaagggctccagaggaagcatcgctatgaactattgtggaactgtctcgtcagttttctgactgctggtcagttttcccataaaatcttaaagcattgtgagggctttcctgtgggggaagagaggtaggaaggatcatgacgagtggccaggttccggtggcttatttgactgcctaagcttcaaatgagatgtttggtcccttacatcttggtgtcttgatattttagtttcatttaagatatgtgtactggacctgagggggaaacattttccattttttagaaaattaaatgaatagcttccttcttcctcagaattagcctgctccatcctagagaattttttggcagaggggattttaaggtctggctcgcggggggcagtgtggtatagtgacaaaggctcacgctgcctttctggttcttttctcagcttttattggctgtctgccattgtgccagtcccttaaactcaggggagcacagggtcctccacagggtagtgaggggtctgcaccgtgaaggagcctttgggtcccaaattctcctctttcagtgtcgtgagcagagactctttacttctgagctctttccctgaatccttcctgcctccttgaaattccactgcctctcctggtcacagaggttctttggtggtaccctactcgcctgcctctggttaaagcagccaggtgtgtgttctctcacatgcttgcctagtttccctttcagggctaggaggtgcccactctgcaggatcctccatttccagcaccgccccccccccccccgcagtgtttataactcctgtacccagcaggatgaacctgcaaagaatggtgaatcataccctgccctcgtccctgcaggtgtgaggctagagtcattctcagcagctggacacagaacattctggattattatcctgctggaaataacatgacggttttatacaggaaacccagataattcatttaatgccctctctggtctctcccacccatccacacatttttttccctcaagactttataaatcactcatgctgtgttattgcaacacgtttttctagtgtgccttaaatttcacattagtgccaggtcctgtgttgggttccattgcctgaaatttccagtcccctccataagccttggaggtagtcctgttaccatccctaccaaatctggagaaactggctgagaataagccagggttcccacaaaaatcagtggtcaagcctgagattggccccatctgcccaggtgtatatccattcacatgatttctcagtcagttataaagtgagatttatttgaaactattatatatcatatgctaggcattgttggaggttctgggaatataggctggtcaagattattaccttcccaatgttggtgaaaaaagaccttgaattgcctgtcacagggtgtctgagttagagttctcaacttgagggaagtttcatcgaagggggagtcattcagtgatagctccccagggctatgtatgatatgtatgtatgatagctccccttttgacgctgggtatgagggcacccactccagtattcttgcctggagagtcccatgaacagcgtagcctggcaggctacagttcatggggtcgagaagagttggacatggctgaagggacttagcacagcatgagggttttaggtgtgaactgtcctgttccagttagaatccctccaaaatgaagatgcgctgtctctaaaatgatgatgcaagttagctgaaattttttttccatccccactgtattaaaaaaaaaaaaaaagtggtctttgcgttgtatacttgtggtgaacttgtgagagagaaaatccccagtggtggataacaccattggccgtttaccctggatgagcaccatgagttataatgcagttagttcaccactcaaaacctttctctctcccaaacaaatggtgtgccagattattctgtgggcttcccttggagcacgtttatgtacagatgttgttgtggtgatggattttgctgctgttgttgacggccactaaaagttgcccttaggattttgactcatttcctcaagtctccccagctgattaaaggataccaggaaatgagccatggtgtcctgagcggagttcttgaagctgaactgcagtgcgggaacccctcaaggcaatggtcaaggctgcagcggtattttccagaatgaatttagtttaacagccaacaggctagggaagtgctaaatgttgctgtgttcatgtttggtgtctttaaaaacaggcaccgaaagacatttgaagaaatcttaagcatgcaaaatttcacacgtggtctctgtaacttgaatagatatcttcatggctgcaaatccagagtgaagagggcctacaagggagttaaagtttgaatatagagcgaattcagtgtaaatcattgttgaaagtagagaggacttatgaataagcctggcttagcagctctggtttctgacattttggacctgagacagcccatcttttgacttcagacacttaattgtaaactgatagcccttacttggatgtgttttatttggctcacataatacttttttagaaaatactggggaagtatttaaaatatggagaatttgtatcaaaatctagatttctcaattctcttgaagagttgaaaattgcctctttacatgggacctagacaatccctctctactgccagtcaggcttttaggcgtttagccttgggcaccagtgagcacaggtgggatattgcaggtaccttgtggaaggagcacaggcctaagcaatgaagacagccttgtcttagtctgctgactccttgactgacagctttgtgaccttggaacgaattgcttactcttgctgagctttcctctttcatcctagttttagctgtgtgacattgggaaaattacttaatctctctgtgtcagtgagtatgtagctacatataaagtttttagcatggtgcttgcctggcacactcatggtacaaactcaatacatgtcaagtttaatacataattattatctataaattagaaattattgatatccctaaaatgggattaatgccttctctaatatgattactttaaagattagaaacaaattattgtaaaaatacttggcgcagggtatgggatgggatagccacctaacaaatgaagaaacttcataaatgtgtagaatttgactatttctctttataatctttgcatgcagattttgacaacttttaaaatgaaataaactttaatttttgtcttgaattttatgtagcttttgacataacagttgggaatcactagtcttagagattgaacagatcttggactattttttcctcaggaggaaaaaaacccccagatttctccagtgaaaatatttatccctcctaatttttcccattcatcttatgctttagccttagtgcttaccttttagttatgaaatgattttgctagatatctttggctgtatacctttctgacagctatgtttttaaggcgtttgcgaacttttaaagtttatgcgaaattgctattcagggtatatggcatcccagttagagcttgggctctgaaattgacaagctgggtttttattcagttctgcctcttgccagctctgtggcctgggatgagacccttctcctcgctcaagcttcatttcctcacctgtaaaatgggaatgatggcatagggctactaaaaggagaaaattagattatgcacaaaacacattttgcatagcgtcccttacagggaaagcatgggaactccaccgtcaggctgattttaatgtttctgtttcagctttgtctcttaggaaagaaatttagaaatggtttaaacccaagttatatagaggggtttgtcttagtattaatcaagacgagatattaatcaagtcgggtccaactctttgcgaccccatggtctgtagcccaccaggctcctctgtccatggaattctccagaaatactggaatggggcaggaatactggagtgggttgccattcctttctccaaggaatcttccggacccagggatcgaacccgagtctcctgcattgcaggcaaattctttaccatctgagccaccaggaaagcccagatcaagatgaaggttatccatttattgttatttttttacttatatatatatatttattgacctcatggagaggtatgtgggatcttaattccctgaccggagatggaacctgcacccgctacagtgaaagcatggagtcttcaccactggactaccagggaagtcctgaagcttatccatttaatgtctggggttttttttttttttttttaaagattcagttagcgttgtgcatcgttccctccctggttctgtttaaccttattcatagctgctttctataagagggggtgcagctttctggataaaagtttaggaggggaaagctctgtagatggccattttctcaatgtgaataagtatagctcacagagggtccctgaatcctatgccttgtaaagtggcattgaaagaaagccttgagagggagaggctcctccgtgacagtaagaggttcttctctagccgttgaaggaccaagctgggcttgtccgttgcccccagtactggacacacagcagtgctgagtcaatactagtttgaactctcgcctgttcttcagcacttgtatagagctttgctcagtcaacgtttccgattcagtttagcaaaggtgatcaatccctatgctttggtccttgcaggtactgtacgtgtggactcctggactgtggaggaataaagtgagagcagaaccatcaattcaaagtagaatttggtgtcataagtgcagagaacccaggcaatatttcgaaagagaggagttcacatattggtgggcatgtgataggtcagggatcagtgaaagtgtccacttgggagataatatttggcattaagttctacactttaaaggagggcagggtgtctgtggttgaggcttgtattggaaaaaaaactgctgaaagagggagcaagagattaagatcttatttgaagatacagttcctgttaggactagggggaaggaattggagggaagaggctggaaaggtggactttggttagcctcaaggattgttggtgggggagggtcgttttagtgttcggtttggtccagattatgcaaatacctttgtagtcaaggctacggtagacttgacccaggagtggccctcccagctttgctcactagtccagggctgtttgctccaccattttgtcctgatgcacaccccccagccagctccaaaaacttgggcacccccttgctgtgggcagctgaaactaaggagtgtgtgtgtgtgtgtgtgtgtgtgtgtgtgtgtaagttttagtaaaatacacgtaaagtttaccattgtaaacattttttggtgtacagctcagtggtattatcttcacattgttatttaagatagaacactgccatcttacaaaaacctagtactctcaatccatgaaacagtccaccagcccctggcaaccatcattctactttctgtctgtacgattgtgacactttatggacctcacataggagaaatcattcagtatttgtctttgtgactggcttatttcatttagcatactgtcttcaaggttcagggcttccttcatagctcagtccagtaaagaatttgctttgttcgattcctgggttgggaagatcccctgcagaaggaaatggcaacccactccagtgttcttgcctggagaatcccatggacagaggggcctggtgggctacagtccctggggttgcagagtcagacacgacttggtgactacaccaccaccttgtggtcgtgcatgttggaatttccttccttttaaaggaagacagtgcgtgtacatggacgtgtctaccacagtttgtttatccattcatccatcaatgaatacttggcttcccccttttggcaattgtgaagaatgctgttatgaacatgggtgtacaaatacctaagggagagtttctgagcctctgttagagtggagttaagcctttgagcgttatatgttagtggggagctgggcaggggtccatcagtcacactctttagatgattagatggtctttggatgaagaactgagcgcttgggtgttagagtgcatgctctggagagaaagagaaacactttagaaataagaggaagataaaggtggcagatttggttcattcacttggccaatttacaggcatcttggatttgccagtcactgatgagataggtgggggaacaggagttgctgtgggtgtggcaacagaactgggggtgctatggaattaacagaaataaagctaagaggatgagcccttttgaaagagggcatgtgatgctatgtttgttctttggtttcttacagactgcattttcttgaaggccaatttcacagaaactacgacagatataaatgaaattcttcttagggtcaggtccaagtgaaaaacaaaacttaagctccaaaggtcaacaaaacatggctctgtaatgttacagtaggatttggggattagaaagaattgtgtgttgtgtaccagtcatgtaatgaaaagtaaattttcctgaaaagaaattgatgacaggaagataattctgcatttattctctgcattagaccatttaaaaagtatgtttattggttttctcagagaataaaatggatgttttaggtatagaagaggatatagagttgattaaagctttgggaaataggccctttgaaagcaacttaaagaaattggatttattaagcctgaagaagataaggtgaagggaggtttagtgaatgacagtcttcaaatatttgcagaatatgagtgaagaatgggactaaataagactagtttaaattgccccagaagggaagtggggtgtgttttgggtgtgtgtgtgtgtgtgtgtgtgtgtgtgtgtgtgtgtggaaaatcctttgattggaaaggttggaaggactttattgtgttaccagaactagttatagggtcttggctgcaggtatgacaaaagctaagtaagtaatttttgtctttaaatggttatgccctgcacccctcagttggtatgatgactttttaggggcctacctgaaatctttgctaaataaaataaccagccccttcactgccgtggctgtgaagtgtttctcatcaattctgagtagactaacaggatcttcacagtttttgcttatgttgaaggtagataataaagaacttggacctaaaattgggttattgattgatgtattggaggtgggggtggtgaaaacaaccacagaatgaattgtacagcgctatagcttaagctgaaggccagaataaaaacaaggaagtttgaggtctaaagtaatctataatcagccgttaattagccctgacctaagaatggctgtgctctgtgattgccccaccgagtggtgattctgagacacagtcagccatgctgcatacaggctgaggtctgcaaggatgaaggagacctttccccttgattactcagggatggactgtttgctctggggctggcccagcattctcacttcccttcgcatctgccccttccctttggtcatttggtgttcatggttcactggcagttgttaaatcagccgaccgtccagcaggggaaggtggtatggaactgcaattcagcagtctcgttgattacatcattacacctgtcatgtcgtcatgcatgaagatttctgagatgtgatttcctgccttgaaggagccgggaatctatggaaacagaagtgctaggtagatgctaatgtagtaaaatttataataagactttaacagttcgggtccagaagctaagacagacacatattgtattgcattgggctgaaggaataggtttcacttttcaggtagaatagctgattgcaaggaagatttggaagccaagttaaaccttgaagagtggggtgattggtcagggtgtgaacaatagaagcagagggtgacagctgtaagactcctgtagaaaacaatctctggagactaacagaatatgagataggataagttttagggcacctgggtttttcttcagtaattgcagtatttcctataatgccatatgtgatgagattttttataagtgtcatctggtcaagtaggtgcttactcagagaagtaattttaggaagagtgtagatctcacttttgcatggtattacatatattgtgggcttgctaggtggcgctagtagtgaagaacctgtctgccagtgccggagagtgaagagacttgggttcaatccttgggttgggaagatcccctgcgggaggaaatggcaactcacttcagtattcttctctggagaatcccatggacagaggagcctggagtcgcaaagagtcagacacgactgagcaacacacacacacacacacacatatacactatgcgcagtgtacgtgcatgcgcgtgtgcacgtacacacgtgtaacacacacacacacacacagtatgcacagtgcgcatccagagtaggtccacggatatgtacttggagctgcttttaagtccagggctgattacccgcccctaccttcctacctatccgcccccagccaagatcacagattttgtatgctcaacatctgatagtagcaagagataatctttgagtcttagcttattaacaaattttaaatatttattataatggtaactcaagtatggaacataaatttgtgcataaatatgcataaattcatttgtttaacaaacaaaaaaacccagcagcaagtaaaaccctcaagccttgaaaagaattctgatcggctctggattccctagccctgccttagaaggtaattaaaaggtaatgagaggtgctggttactgccctgtccaaagcactgatccccgggggggaggtagctgtttatgagaggtggaaatctattatttgagataaacatgtgaatgatggtattttccagggaatgccttgtacttgacctaatggattaaaaaataatagggtaaatgaaaagaggagaaatccttactttttcctttgtatctcttaaacatttggttttaccccaggtgactcagataatttcaaaggacgttttaaaattcttgaaaacaatcagggctgccagtaagttaaatataatggcctatgcagatttagcagaggaattgctttgcagggtttgaacaaaggaggcgttaccaggtttgctaattgtttggtgtctcttttgtattggaagggaagtatttatagaaacagatcaaatgtagatttgacttctggggaaaatattagtgattttgtgtggcctttggctgtttttctacttggctaggatatgttttaaagaaaacaagactaaatagtttaaaaaattgggaattattctacttggaaagactggctccttttaaagcgtgctttatagtttgtaaaatgttaaaaatgtgtttccatcatgttcttcacaatgtagatttcttttttaacagctgatggaagattttcatctcaagaaacagcctggtaaaaccgcacaggctttaggcttttcgtcattagttaaattaaactaggatcctttctaaaaatacgtcattagaatcgccacttgaaaacagttaattgggaagtttaagtggttttgttattttagtatagtatatttactacagggaaattgtaggcaagttcctagctcactttcatgaaaaagaacccttctttccagtcttttaaaataaactagcatatgtagaagggtttatgaattttttaaggagatctgaacgcgtagcctaatttccattccagcattttcaagggatattattttaaatgatcactttagtttcagaatgagtgccttctaaggagatactggccaggatgccgaaagtgctacagtagtgagcagcctgccgttggcaggtgagcacaatccaggcaggtgagcacaatccaggcaggtgagcacaatccaggcaggtgagcacaatccaggcaggtgcaggtggcttctctctccatgtggaaatcttggagcagcacctctgggcataaagctgtagtgcttaacacttacagcttcattctctccgtcccttcagtgtcttttcagtggaccctacatgtaccaggaatttgtagatttgtttacaaataattattgatattctggaggggcatagccacgaacaggcaaatatccttgtccttttggggcttatgttctagtgaattcttttcctttcatgagcccaggtttacaaagagcccagaagaaagaaaaggtctagggtctctccttgagaaagcagctttatttagatttatttcagttttgcattagggtcaattaaagacggaagtaaagaaaggcaagatttctcagagggttgggggtcacagggaaggaggggccagaggaggcaaaatggagagagatgggagtgtgggaagggaaccgggttgcggcaactcaggaggagctctgtgagatgtttgtctcctgagccctgtctgcctctgtggtgccccacataccagtctcccagcttgttatggctctagtctttgtaacttcagcctctagcaggtatgagactgtactgatgaaggaggtaccagagtgggtgacagaagtgtccacaatgccagggaatgtcttcacttctcaggagtctgcagagccttggatgtgccaaaagtccgtcatccgtctgtaggtttggaaccattttttcctccgaatggaccagaatggtttttcacagctgagagagatgcttcagggatacaggctgaatgctctccagtctgtctccaaggacgggaggctctgtacctccttttcaccttctttcatcttttttttttgggggggggtcaaaattgaccatcttcagtttctaatgatacctgtatttagcactgtgagtctgacaaagcacccaggtcgtggagaagctaaaacacaattcagccactgtcttgtcatgctgggcatggtgtttccactccactgttaactgcagtagcgtggatgagaggacaggatgacttctttgccttttagccttaggataaacttttagaggtccatgaagtgataagccctccagtttcaaatcaaggactccccccagtgagaatggatactctgggtacacaggacaggaaagctcctcctctgtccgctcttgggcacagagtaggactcgtgctgcctttggtggcggtagtgtccatgctcaggaaagaatccaagatgaagactggggaacagcgagtggtaccccaggagttgtgtgtggcagagaaggcctccccgctgactacagctgtggttacttaatgacggcattaaggtgagtactcaggtgcttgggacagtgtcagttaacaattctggtgaaactaactgccttaggtatacaagtgtgggtgcttaagtaattatgaaatcagttgctttaaagcacttcatctagagttgatggaagactagtgtttctaagctgagaatagaaataaaataaaaatccagtgtcgtcatcattcattagcacctgttgttttgggtgagagcatcagggcctaaatgtaatagcctttaagtctgctctcagttgactagggaagggttgaagaaaacaagagaggggcctgtgacttctcagctatttcctgggttatttgaaaacttattagcagccattttatttcaagatggaggaattggatctcacaataactttaaaaactatataaatatatacctttaaaatacacagaaatgtaagtgtgtatatatatgtgtgtgtgtttgtatgtatgtgtgtatatatatatatatatatatatatatatactggggcttcacaggtagtgctagtggtaaagaacccacctgccaatatagcagatgttaagagatgtgggttctatccctgggttgggaaaatcccctggagggcatggcaacccactgtagaactcttgcctggagaattcttcagacagaggagactggttggctacattctgtagggtcacaaagagtcagacatgactgaattgacatagcatgtacacaggcatgtatataataattatgggagcatctcacacatggagacaaatggaacgaaccctcatctacccatcatccagcttcagcaattggatcagcaccagtctttcttcttcattttgtcctcccattttgtttttcctttttggccttgccatgtgtcttgtgggatctttagttccctggctaggaatcgaaccctggtccatggtagtgaaagcctgtgtcctaaccactggactgccagggagtccatcccaccttgtcctcccattattttaaagcatatctcaagcattgtagaaattcatttgtgaatgtttccagtatgtagttctaaaatagattcccttctctggctataatgatgccagtgtcaacagccttcaaagtcagtaaagttccacaatgtcatcgagtatccaggatttacatttcccttattgaaaataagtatgaaaacataagtggtgaacatataaagttttgctagaatccccacaagagccacacggcctttaagtcatttctaatttgtaggctgtattccccagtgtttgttgaagaaactgagggtttgtcccgtgcaattttccacagtccaaatgctgctgctgcctgcattcctgtggtgctgtttaacatgttctgttccctgaatttcctgtaaacttacatatcgaggtatgatcatactcgtttgatttctttttttaacaagataacatcagtagatggtatgttcctctataattttattttctttctctgttttggatatactgttgagtacttgcaaagtttttggcttttgttctaatggttgcctttacactgacacctttatataataactcttggttcactctttctgggcccagtttcctactggttgccttctgtgagcaacatttaaattagttattggtctgttctttcccttttctctcctagcttgggatttgaagagatacttttgtactcccagttactatctataaggcaatcagcaagcatattctgctttgcagagactcctccatcccctaacttttctgaaactacaccaaaattactttatcccaatgtatagcagtcacatattctgctatctcctttttaaatcatcatttaatcttagttctgcaagtaaatctatatttaatgcttgccaccacggcttatgtcttgtcttttctgacattttggttttccgtagcttgttctctaaagtacctcagaaagcactcatgggaagtagttcctgaattatgttcacaggagcttgtctgtagcctttgctttttatacttaaaagccaggttgtttgatgtaaatccttggctcatcttttctttgctcaaggatctttaatattttactgtattgtcttttgccataaagtgttgtcaaagtctgctggcaatctgatttcctttccctcatatttagcttgatatgtttgtctagattcccaaaggactgttttttacctttattctttgaagtctagtagttctgtagtgttagatgctctgggttgatttccccccccccgccgcccccaccctatcgggacataatgtgctatttccctggtagctcagatggtaaagaatccactgacaatgcaggggacctgggctcagactataaatttaaatttgcttacagtgcggcttttgctcttggttctatttttcctcttggcttttagagctcccattgtgtgcatgttagatcttctttgcccatcttttattttgacctttctctctcaaatccttttaatatcttcatagtttgatagaataaaaacattttcctcctcttcttttgaggcattattcattttatttgctcttgtgttctttttatttaccctttatttctaaaatggcttttttctttcatttttcttggtttttatctccatttttcaaatcttttctccagtcagctcatttttttttcttttttatttaattgaagtatagttgatttacaatgttgtgtcaatttctggtatacaacaaagtgattcaggtacatatatatatatattcaatcagtcagctcatttatgactttaaaattccgatttagtctattctttataacttttttatttcttttagctcatttttgaagtattatagttttcatatgtgttttttttgaagtattacagttttcatatgtgtttttctggcatgattttattgtctatactagggatgtgattctgttccttactctttctttaaataaaacattcttttctgttgttcactatgagttttagttttcctatactcttagtagatagaaccgttatagctcttcttgcttcacagttctaaagaacccacttacattgttttcatgaagtggtttaaaaaaatggacttgacttttccacttctgagagcttaactttttggtctctgtccccagctcttacctgactgaatctttcctttgccccaatttactcaccttggattcatccttagcagtttctccacagtgtggagctttcgcttagtttgttagttcatagggattaggcctcccccacccccagagcatccccgcacattagaaatacatgggacacaatccctctacacttcctagggaagctggaacctgcagagtactctgccagcttctgtgggtgttccagaatggggatttggagctttccagtgagcacctagtggctgttcttcaagctcctggtagtctgtccccacttccttcatacacagggttcctggggataccttatcacctgggtttgttgtagatgctgtctatgggtttttggttctgctctatttgtccgtttttatggttaggatgaattggggagattcaatgaattacgctcccaccaccatcttgccagaatatctatgggctttttaacatgaaattgataacctttgggtctgctagcaaaatagcaaagtcttaaaatattaaatcactaataatggctgccttatttaaaagtaattttctttcaaaatataagaatgtgtgatagaaaagtcagtgcttctaactatctgcaaactggccactttatgggctacttaagccatattctaaacttggtgttacaaaatgtaatggttgaaattatctgaggaccaggaagtcatctctgggctgttgtttctgaggaaaaggtgtaaagagccacccacttttgccattatttgtttgggttgatattccttgagttctaaaggagacaattctattttatagttttaaaagggttaaaccacatttgcacttttaatgccatctagtaaagataaaatcattacttaattaggtgcatttttctctttcagcttttctccccccagtgaagaatttgcatatctctaattatagtcatttgaaaaaaatgctgccaagatttgacataatattaatttagatttccaaaaatacaaaatttccttcctccaatttgagtttcctccagttggccattgatttaaattacatgctaaaaggtgacaatttagaattggcccccttttcctcctgtatttagggacaaccattattctaaagccattgaaagaagtaaaacttactcagtgggcatagtagaaacttttttttaaaattctggaaaatagagcaagatcatttttagacatttccttttggttttctatgaagagattgagaagaaatcatttcaaaatggagctggtctttaagaatcctttgcaaagggtagcaggcttaatgtattgctctaagtgaatgtcacccaagaaaaattaagggaaaagtcaatactcattaagcagattgaccagccaagtgttttggtacatgttgcaacaaatttgaataaactaattttgtccattagtgtgcttttagaccaatgtgattgttttggtctaattattttttattttgtgtattcaaatgtagaatggctgcagaattaatgattacagcaattatctgattagcaatttagaaaattggtgagtggtatctgactactcaccaagcagtgcctggcatttcataggactttgtgcaggagcacatacagtctaaggagaggcttgggctgttgtctgtctttgacccactgcaggtgggagccctgaggtcgtcactggttagcctgggctgtggatgtgggctcttgcatgccatgcaccagattgaggtctggtgtgctgcagaagttgtatttgccaccctgtgtcactcttccggagtcctgtagctgtgactggtgaattctgcaatatttcccacttctaaagcttggggattcgagaaatctgtgcccgagtagctgccaaagcttgtcagggggacccagcacgaggccgatttctaggtgtaaaagccaggcagatttgctcactcaagaaaatctgttttttttgcaggtttgctttgaattccaagatacagatccagattaatgctggttaaaaaggatttttttttgttgcactaatgccataggtttctcctggtaactgactgccttgtcggggaggggatggttggttctccaagtatggtcctagacccgcagtagcagcagcattacctggggcttttcaggggtgtgcagactcccttcccaccccagacccaccaaatttggaaactctggggatagggcccagtgatcccttttaccaagctactccagctgtatctggtgtaggctaaagttttaaaaccaccaatcctgagtataaaaatgactgagctttgttacagtgttgggctgagatagtttaaaaaaattaaagctaatgtagcctcttgaatattagaacagtgtgcaattctctgttctctttccgttgcactgaaaagatggataggtgtttcagttgctccaaataggaaagcagacaattgcagttctgggggacaatgcccctggtagaggctgcaaaaaagtcgttcatggaagtgggagtgggggaatggtggtagaaaggcccctctggattgtattttaaaggaataaatgtgattgtgttcctctctgattcaaacctttcagagacttctcagtgttcttggagtaaagtctgtccatgtagatcccatccgagacttccagtggctccacttgatctccactttgcacacagtacctgccgcgtcttctgttctcagggcttgcttcactccttgaagctgtccttgctccttggagctccctgcccctctgcccctgccaggggcaccagttctccttgcttcctggtgcccttcagaccccagctgtcatgtttcttttctgaccccccagggtaggtcaggtcagggcaccttgtatgatgcatgtctccccactctgcacactgtaattgtgtgattggacaattactggttgactggtgcagctaaatataaattctgtgatggggagagagagagaccctgcctttttcagtgctgcacaagggtccagcctatagcaaatattcaagaaaagtttttggatgaatgaatgaaaggtagggagaagtagtcccatttttattcctaggacatgtggggtgattaatgtatgcaattttgatggtgtgtcacctagtaagttttatttataagaccagttgccaccatcatctaatcctactgctggaagggggattcccttggacaggggagcagaatctcatgatttctagtttggaatctggcttatgggacgcccaagagaggttcttgagtattatgcattcaggaatgtgggaaaagggggaaatcctctgatcatggagatattcataatacacaggccagtagcccgagtgctaaaggtggcacctgggggggtttcagggaaatgactgttgtcctctgttccctcagggcttccgggaagacctgctcactctgctcacagagttgatattggggcaccatctttctccccgcgcacttttagatctttttgatagaattcacacgcactcctttgcctcattttggtcaatttgtcttggcctaggtaaagctaggatttttcattcctattatagaaggtgacaatatacaagttacctcccagaggtgatagcttcaaagtgggagcattttgcctcaaatcagaaactaagtaagccttggtaacaatcagtggaagggttggcaatagcatctatggatataatttattaaaaatacacatatttagagggctcatttgttttttgggaggtgctgcacaggggatcttagttccctgaccagggattgaactggtgcaccctgtagtggaagcagagagtcttaaccactggacagccagggaagtaacttaaatcctctttaaagatggtggtttcaagatctagagtggcttgttggcactctttcttttgatataggaagctgataatctgctctctgtatttgccaaggcaatggcacccctctccagtactcttgcctggaaaatcccatggacggagaagcctggtaggctgcagtccatggggtcgctaagagtcagacaccactgagcgacttaacccacttcacttttgtgtttattttacatctggggctcagcatactctcatacccaatgtaaactcctgatagaaagagtgaaatggaataaacacagtaagttttggaacaaacaccataaacactatttctcatttgcaaccatttattgaccataaggtaggtataggatttagagataatgtctaaatcctgatgtagctcactactgatttatagatgtcggaactctgaagcttggagaggtcagacaacttccacaagtttcacatcactcaacttggaatctctaaaacccataccttttccattttattcctgtggcctcccctgctcatctaagctcagaaaagcagagtcatctccagtctctgagttggactctggactttaaaatactgttgaataaagttacagaagttgcaagatgaatgcagagaatttcaggatacccttcacctagattgacatattaacatttcgccacatttgctttgtccatgtatatacatattagtttttttgactcttttgagagttaagttgctaataggcctccctgaaaactcatctgagtcttagccttgggcttatgagaatatggaggccacccaggctgagttccttttctggccccaatccatatggttctaccccctccaccgcccccccccaacccgccccaagcagggagcctcagctcactcttgccctcagcatcagtcccagtcctttaatttagatcctaaaacccatgcaactgcctttttaaaaatgggctctcttcagcaaataaccaacaaaccctcttctatggcacctagtataggcaaataaaaaggggttcctcatgtttccacttactttgtgaaaaagggggagaatggggtttcattctaccttgttcagggctgcagataaactatttgaccccttccctttgacttctgttttcaagagagttggggcttcccttgtggctcagctagtaaggaatctgctggaagtgcgggagacctgggttcgatccctgggttgggaagatcccctggagaagggaacagctccccactccagtattgtggcctggagaactccatggactctatagtccatggggtcgcaaagaactggacacaaccaatgctggttaccttttctctggcaagtgcttcagataaaattcctttttttttttaaatcaataatcttgtttttatttcctctgttttaaaccagctataagatgacattttgaaagtggaaacaaaaggaaaaagttctgtcctcctagtgtttgggatagaggggaaggtgcaatttcccttgtctgacaggtctgttaaaagcagaattcggagtataatcactaattaaatgtattgatttacccattatggtgaaaattagcttaaacatctatttaagccacgtattattccaagcatttttctgagctagaaaagcagagagcgcgctttcaaaaatatagatcacatttgaagacagagtttaaaaagcgcctcaggaaaacaacccaaatgtcaggataaatggagaaactaaaatgtaatgcaatacgcacagtgaaatattattcagccttaaaaaagaaattctgacacacactaacaacgtaggtgaactttggagaccctatgctgagttacgtgagacacagaaggacaagtattgtatgggtccacttatgtgtgatccctagagacagcaagtaacacagcggtcaccaggggctggggtgtgggagtgatggtataatggagagttattcctgaatgggtgcagactttgactttggaatgatggagaagctctggaaatgggtagtggtagtggtcacatgatattgtaggtatatttactgccattccattgtttaattaaaaatggttaaagtgatagattttatgttccatatattttgccaacaaaaaaatgttctaaatacccccattggcatatatttacgttatatataacagtcctttgtttattggtaacagtttgatgtcattagaatgagatgctgtagaattaaaactagaacttctaagtgtcacatttttattttgtataagctttcatttgcttttaactctgcctcatttccccgtttgatcctgggaattggcattttgaggaattgtcagtttcctggttggcggacaaggtgtggtgattagattagaactctatgcccacactcactctcaaccgcacatgtccaggacagcgctggcgtgaagtcagtttctgacaggtccttctgcaggtcccttcaagggtctggctattctgtcctctgtgaagcgtgcagccaggggggtctatttagaagtgagatgcctgcatgttagttttccgtggccctgggtaggtctggggtgaagctggcctttgactggcatggctgactttccatgcctttcttgccctgttccttttcactttgccattaaaagaagcgacatctgtcaaagctcttctcaggttggagatgatgagcaaagttattaattgtgtctgctaagatatttaatatttgttctttaagtcaaggaagttaacattgaaagaaatcaagagctcccccacctccaccccccaaccacagacttcacagatggtaagggttttgttctggtgtttattgatttgagtcctgctgctgcttatctggtgcttctttctgtaattgctttccagaactcaaaacatggaaatctacatatttacaacaagagctgcactaggctgttggggaaaacccgctggaaatgaggacgttcctcttttctgctgcacgggtggatcctgatacatcgtgcttgtcaagtccagaccttatctgactcccccaagacacacttcataatggccttgcagatctttgtctaagatcaaaaggggaagttctgcttcctcaaacatcaggttgtatttttcttaggataaatgagtagaaaatatattaagtagccttgtgaaagcctttgctgtggaggatgtgggtgtatctagaagagattttgcaggataataagatgagaaggatcctcctttcattgtccaatgaatgacacatgcttactgttcattttgtaaaatgtaagacctagggactgaattccatgtttaggcccttattctaattctgtgttcaaacagtagtttcaaaacaaagcaggcaattaattatattacttatataataagagaatcgttgctgttcattattgccacaaatagttgagtactttttatgtctagctactggattttttttatacttttttaatcatgactcttttaaggcctaagtatttgattaggtacattcgatgccctctttttagtttttcagaagaggaaacagaggcctgtggacttgctcaagatttagaacctagaatttctctatgtccccaccattacattttttcttcacttccttcactaactgcttcagaggaaaaatttccaattacacatttcatctaaaacatacagataataaatatcttagcagataccagccaattaataactttgcttgttgcctccaacctgagaaaagctttgacagaggttgtatctttaaaaggcatttattgaaagcttgaatccttgatgctgagtcctcttagtatattttcttacaggtgtgcagaacatctaactaacatcttgatcttggctgtgcttttcaaacatcaaaaacagcccaaggatgtcttctcttgccaccagatggcacacttgtgagtggagagccgatggaaggaaggagttgagggttcaagcacagggaggctcccagttggggacttggtggatctgagtggggacatgctttatagcagagcaccaggcctgcatgatttggcccaggatcataataacagccagaaaagcagaaaatggcagtactgcaggaaaggtgtgatcaacacaggtgatttattagttctgggttagtccatgtggttaaggcagaaaatagaggggctgactctggccccaggaggaaaccactctcgggagcagaggcaggaagagcccaaaccacaggtgaatccacccaggctgaaagcctgcagaagggtgagccagtgaagggggtggtggggatacaatcctgcctcctggagaagggcacccccgttcacaacgggacatcccttcctagcatgaatgaatcactcttgctcagacgtccatcagaatgtgggacccacgtgtggtcccatggctcctttgtgcatgaatatttttctgaaaagaacaggtccaaagaaacaggggcttaaaaataacagtgtttttactctgcctcatgcagctcgtggccacattcatcagcccttgcggtcaggcagtagctcccttggtgcttccatcaggtctgccgagggaccttctctgctatctctcctctttgtctcttcttcccgttccctcttcctttgctgttcatcctggctgcctgctcctgtggatattcatcctcccaccttttcacatgggcctcctctactcactgacttcaggagtcctcccccctcaactcccccactcatccctcccctcctgaccctccttcccttgccgtgctttcagggctcctcttctcccatatcctatgactgcagtaccttcagagattctgcaggaattggtgtggtatagggctgggaggttggggtgctggtgtgcagtcaggggtgcaaatgagtggtgtaagttctatgactcagccctcctccctactgtcagtgatcagctctgtattgaagactctgagactggttctctgaccattcctgctcccctaccccccacgcccctgccgctgccatcaaaatctagcatccttctaggagtctctcctcaccatctagcttggagtttcctgcttctttcttaccaatcaagtcttcatcatctctaccctactccagctaccttgggccttgtcactttcttcttggcccctctgttctttgtagtctccaccaccttcgtggatgacttcgtggacacccctcataccaccctctgaccacccactgggtgctgatgagtatgtctccggccctgatctcccccaccaccccctctcggtttgcgggaccttctagcgaccgcctgctggtccacatatctctaaatcaattttatccccctctagtcttttggcaccctttcttataggtgtaagccccaaactggggtgtcttctctccttcctcttacttcctcactgctcagatccagtgcatcccaaggccccatgttcacccagtaagcccatctctcctgtccatccccacacctggcttatgctctcattagctcctgtctggatctagtctcctgactgttcttgtctctagtcctgttttgtcagtactgtcctcccctgctgccagagggagctgcccccaaaacatgcaccagtagctccccatcagggcaggctcacttccttaacacgacagagaccctcctgggtctctggtcttaacacagcctgatgctgcagggattctgagtaacacatgacttctaagcatgcaccttactggttctgtgacatttgctcttgtggtccctgacctgatagaccaccttctctgtctgcatgcagcctggccaggtgacacacattctttaacccgagctctaggaatcctttctgacccctcttcttaccatccccgcccccatcgccctttttgcctatgcttgcttcattgtactgttattatctgtgtgagtccagcttccccactgggctgccatcccctgctctgtattcctggtccttggccccacccaggcaaaatagtagaagctcaattaccactgcatccatgaacacacgtttcagaagtgctggctttgtttctgagccctttctctgtgcgattaatgactaacactccaggttttctttctctgccctttggtttctttctttcaattaattcataatctttagaccaacattgaaagacacttgagttgctttaaaaaaaaaaaaagctgtgctgcaggaaatctttgttattttctgatttttaaactgactttcaaatggctgatcattttacaatggtctattgctattacttgaaaccgtaaaccgtctcgaacatggaaacagattttgtgtaatccctaaatatcctggacctaaagtagtgccaagacctagcatgcagagagaaaatttcttttattttcaaaagctaagtacaaatttgcattgtaccaaggaaatgttttttcagtccccaaacatgggaatattacagtgagagacttaaaggatggtgaggaagttgtgtcagttactttttattcatctcaagtctaaaaccaagtagatttaggcagtgagttctactcagttgagtcctttaaatctctctgttacaaaattaaagataactctgaacttttctcctacccgcgcccaacccctcccccacccccacccccaccccgccacaatccatcagaaacaggacaattgtaaattggaattcacatgatccatttaggactgttctcagatttacctgtggaggtgctcttcaaggttggagatactcaggatttgggtgatgtgtttggaagtgttgggaagtgttggaagtagttgggatgtagttcagtttctttgaaagctcatgttttttcccccctgaaaagatgcatttttttttgttgttttacggtatgtattgtaatataaaacaaacgttgacagtaacttgtcactgagtgaaattgaccttcaagaagactgttaagcaatcttctagctgagaaaagcactgctctgtaaggtgacgtcctaaattaccttccccaatcctgcacctgtatgtactcattccttcactgtgtacttactgagcactttgtgtattcctggtaccccgtgaggctttgaggctagagatgggtgcaaaccttgctttggattctgagagctcgcagtttagtgggtggcatggggtcctcataggatgaacttttcctcaaacacacatacaaacacataaaagtcttcctggctcagctctcacagcgcctctccgtggagcttttcatgttcgttttgggcagaatgacagctgcctccttttagtcttgggacctgtttgtcatctttcagtatttttgcttcatttgcattggatttgtctcctttgcaagactgagttccccaccagcatctagttcactaccatggtaataatcctgcgatagatccatgttgacaccagtgacttcttaatggttctggtggcatggcttcaccattgtgggatggggaccatgctggggtcctccatggcaaggctttcttcagtttgcgtgaggatccagagtggattcacaccctccctgccactgggcaagagcatttttaatgacttgtgttcactgagctcatacctccctcccccagctctattctatttccagtatgatccacttgtttttaaagcctcatgggtcttgtgtgcaattactacaatccttccatcttgatttttatccagtttgctcctgtgggaatataaaagtatgtcagaaacagtaggatatacaaatcattagctcttttattatgaattgtggttgaatagtatgtgaaccaaagagtagctgaattgcagtagagctttgcacttagcctttacttccccaaaactagaatagcctctctacgtgggtcttcttcagtgccattattttgcctggttccttatatttgtgtccaaagaggagaaggttttgtaatgacttccttactttgaacttcagctgtaaatctggtttttgcagctttagatatttgtgaaggatattttagatatttttgaaggaggacaggtgagacttgtttgaataaacagttgacatggtccagccactactgtagatgcctggggagcctcctgtgctcaagcaagtcaaccctacttatgtgggtcattaagagccttctctagaagtccagtgtggactctcaatgagtctttgaatccaaagattacagaaaatagcaggtctacctcgaatgggcttattttgcttaagaaaagaaaaattgatagctttgttctttttgatggagaagcaaaacctttcctgagtttgggttgactgatgggcattctcagaccgttctgagctgctgtcctccacacccacaatacagagtctgcagtttttaattttagcttggaatgcataatccccccgtgtttgcaaattgaaggccctctctcactcttctagtgtttcacccacatttaacttgaagtacttgtgggtgttttttttttttccagttgagccacccttgtaagagtgttgcttagttatcagagaatcgacagctttccccccacaacatactcatatttcatcaactttcataacatgtgcttagatataagagacgtgggttcgatccctgggttgggaagattccctggaggagggcatggctacccactctagtattaggcagagggacctggtgggttatagtccatagggtcacacagagtcggatactactgaacgacttatcacacacacaatttatatataatatactggcaagtccaaattctataaacaggtttgaaaataaaaccaaaggactcagctggtgtgaggagagaaggaaaaatggatggaagaagaatctggtagccttgagtattcaagtctcttgggcagtagtcagtgtgatttaaaactccgggttattcagcccggagagttaaaagagcttcttctatgaatgcctactttgtattaaggtagtagaaaactacgaagaaaaggtagtgttcatgcccttaagcacagctgtgtggaacgaataaaaataataacagtgattaatttttagtgatgtggatttaagataaatttggggggctcacagaggctgctactgaaggtctgagtggtcagataagaaagagcgaaggaggctgagaaagtttgaggcttcacctggaccttgattttaaattagatcaattttaattattattgatttattgattttaaatctaagaattactgattttaagtctctaaaaaattgtggcaaaatatccataatataaaaagtaccatttaggagtgtctaattcagtgctgttaaagtgtgtttacaatgatgtaccactgtcgccatgtcctaaagaaaatcatcccaaacagacacactctgtagccattaaaagagtaactctccaatccttcttctctttagcccttggcaagctctctcctattttctgtctctatgaatttgcctattactcatacctcatatatgaggaatcatacaatatttaaccatttgtgtctggctcatttcacttagcataatgttttcaaagttcatgttacagcatgtcagaatttcattcctttttaactcctgttttgtgtatacaccacttgcctgttcatctgttgatggacaattgggttatttccaccttctggctattgtaaatactgcagctatgaatgttggtgtacaggtatctgcattcctgctttcagttcttttgggtatggttgaattgagtcttgcattgttgactattcgttagtgcccttttcctctcttatttatgctttttgagatcagggactgtctcctaggtccagcacttaagcaggatagctggaatgaatattttctgaatagatcctggagttcctagcccccagctatcattcactgtactagttggtcctcagaatggtgggttttgccatctgtcatatttggaggactcattaattaacatattcaggaaacagaaaataactcagtgtttttattagtcaaacatcattagggaagtacatttcaaacacaaatggtcctgacatagataaaacttcattcagcaaatgtttgttgagaacttgctgtatacagatacatttcaaaatgtatgattccagagcagtttcaaagctcagttggactaatttattgatattgacttttaaatataaaggtgtgtgtgtgtgtatatatatatatatgtctgtttgtatgtgtatatgtgtgggtgtgtgtatatatatacatatatatatttaacatgaatctctaatctttgtgtttgtgtgtgtgtgtgagagagagagaacattataacagcactcaagatagtttggagaaaagagaataaataatatccacagccacgctctagtatatgctcaagtttgtgggtcaaacttacgtcaaaaaccctgaatgcttctggtggtgactattttaaaatttttttttttttaactctaaagtgtaagctgctgctgctgctaagtcgcttcagtcgtgtccgactctatgtgaccccatagacggcagcccaccaggctcccccgtccctgggattctccaagcaagaacactagagtgggttgccatttccttctccaatgtgtgaaagtgaaattgctcagtcctgtccaactcatcgtgaccccatcgactgcagcctaccaggctcctccgtccatgggattttccaggcaagagtactggagtgggttgccattgccttctccaaaagtataagctagtgatctcaaatttgaaagcttttcttttggtggtatctatagtaattttaatggatgaatcaagccattactttttcttagtagagcagcagaatagacattgtcctcctttggagaagaggtcagtagatttgacatttgttactggggctaggtgttttggaacctgtccttccaccaatcttttatatggtcagtgattgaagggaatttttgtgtaactgtgctggggtggagagggagtacgctttatgatccttgttctgagggccctaataccccagagtgggcagaggtaagatctagatgtagaccactattgtacatcagaagccaaatgggtgatgtagctgaagattttggagagtttagtgggaacaggtgatcgtgacctggaatagttagagagcaaacactatccatgaagattggtctttcttcctgatgaggaggcaaaataatggagtagttatgtcctgggtgcatggacagagaggtgggagtagcatggaatgaagagcgttcacaggatccttaggctaaaaggattggagaggcaggttgggtccagaggaaacagctagaaattaacaccatgagagtgctctgtaagctgtgagtgatgtcagcgttagctgctgcttgcctctgttcgggtttttgaggctggtgttggggctgttgaaaaagtgttttaggctgatgggtctcagggttatgaggcaggatgatttcggggtggggtgagtggaggctggaggcatggagatctttcaggaaaggatgttctttctggacattgtaaatgatgtctgggatcagggcagcaggagtggagagacgtacagggatgtgtgacagaggctctggggaatgactggtatgatttattgccaaggagagagaagtcaggcagaaatctgggaaatgatgggcccagttacttccacaggaaatgtcaggactgattggagggaagatgagactgttctagagtaatcgtgtcttgtacttattatgtgttttctgcatgcctgaggacagttctgagtgctttccataatagctttataaattaggtgctgttactgtccccactttccagatgaggaaaccaagctagagatgcttggtaactttcttaagaatcacacgcttgcatcctggcagatgcagatctggacagtcatatctctagatgtgatcatactgagggaagtaagttagatggataaacaacaaggtcctactgtatagtgcagggaactatattcagtattctgtgataaacgataatggaaaagtgtaagaaaaagaatatatatatatataaaaccaaatcactttgtttatagtagaaattaacacataattgtaaatcaactatacttcaataaaaaaaaattagaaacctcaaaaaaaaaaaaagaaaaagagtcaagttcttctctaggatgccttctctaggatgccttagtgctttcactataataactaactgaagaaagaatactgcagcatactccagtattcttgcctgggaaatcccatggacagaggaccctggtggtcatttccttctccaggacatcttcccaacccaaggactgaactagcatctcctgcgttggcagctgtgttctttacccctgagccaccatggaagcccagaatgaaatacatttgcagtataaattcttaaaaattttggattaaattgaaagtacttcatttttaaaggagataaatacttgaaaaaccagcgtcttcacttaccactgtgcccattttcattatttaacagtctgtatgactaaaactcaccccaactacttcatttccatagtctggttccaccatttagagcttcagtctggggacacacacagtctggaccatagcacttctcttactcttggtgctcggtaacatgtgatgactaattcactttattgttgaatcttccatgactcaaggctgcccagaatcttctgatctggggtgtactttgcgtgacatcatggggctataattgatggcatggttggaaggcacccagatgaaatacttgtctggataactaaactgagactggtgacttatacacaccttcaggggacaacttcagcccttctgtagagcacttttgggccatccctctctggattctgttcctgctattctcagatgtcagcatgcctatttttttttttttctataaacttgtaaccttttaactgctactaaagtgttaactacagatctatttctgtgctttctcctgccatagttctccaggaagaggtctacacttgcaggcttaaccttgaagccaacagaaattcccactcaactgaaattggatttcctgtggtgtcttcctaaccagatctggggacctgtgttcgctccctttgatcttgctcagcatctgccctgggacccatccaccttctcttggaaaccttttgatgtgttgcctcccttgtcttttttagcctctccccttcctttctgatggtcccattaaaaaaaaaaaaaatctgtcttggctctttcctacccactcttagctggaagaactctgcgaccagtactcagtgtgtccctcttttttctacataaccgtttccttggattatttgatcctgtcttataacttcacaggtacggctcttgccccaccatctgactttcacatcatcaggtgagaagtccacctgctggccaggtgcggcacctgggagcaggtgtcccgcttctcccacctctgcccctttctcaccttatctccatccctgccctgaacgtgtgcagaggctcctgctgtggcttcctctggccgcccctgccgcccactggcccctgccgcccacacgctgcttcctccactggcttggacagcttttgctgctccttcagaacccacgtcagttcttgtctctgaccttgtatgtgtggaggggggcttgtgcctccccaagacacatgaaccatccccccatgaccctgcagaagtggctgaaagccccccagggagctctgttatcctggtgccctcgccctcctcgcccggattgtacatgagtcaaccttctgtgtttttcatggcgccgtcaccactagtgtgctctttctctggccgcctcacatcgtcgtcttttgtcttaaatccttaactgagttctgtggcttctgctgacctgagggccagaacttttcactgatctccttgaatctagttgacctcgggtatctcactgtgcacgagtgtctctggtgcctgtctgtggtatctgtctgtctgctctttctcctcttctgatactgtggaaatccagtgcactcctttctctgtagcctgaagctgtcttgaatctatgtttcatcattctgacattgaacactgtgtactttaagctctggagtgtaaggactgtgtgtcccctctacgtggatttttttctcccagcatctaacacagtgcttgcttttgcagctcgtaagtaatgagcagatacttaccttcctgcaaggatgcatgtatgcattgtatgcacaaatgaattaatggctgctgtgattttctaaggttccagtttcatattcagattctagttttgtatctttagtctgaccctctcccagctgagctattcaggcactccttttagtttttgtatctttagtttgctatgtagcaaatttctgtaggcattaggttgatcaggctgcaacccaacgtctgctatgaaatctcatgatctgatcattaaaataagattttcattttctgccttatcatttgaaacacaaagatcttttttttttttaaatgaccatcaccgaataaagagaattgcatagaaataactgaattcacaaagctgtaagaaaagccaggctaaaatgatcatgtatattttgcctaaagagtgatgggccggtagtttttttgttgtgttgtttaatcgtgtgaggttttgtttttgttgtttctagactgggtgtcagcatgtcagtgtcatcacagtggcccatactcagagtggatacttgaccctgttgtgtttaacccagagaataccatggcatccagcaagtcttggcttgcataccaagggtgaccctcaggattaattgagagttgccgaaaataacttaattttctagatgaactttagaaactttaaacagaactctctcaccataaatagctgggcagctttgtcctatttttattgtcgagtacacagaagatggaaatcaatattggaaaaaatgctttatttcgcccaagaaaaagatcatgttcaacacaattttcgtttttcttggcaggctcttctcaaccatctgtgagtccaggggaactgtctctaccatctatccatccagcaaaatcagagttaattgtcagtgttggcgacgagattaggctgttatgcactgatccaggatttgtcaagtggacttttgagatcctgggtcaattgagtgagaagacaaacccggaatggatcactgagaaagcagaggccacaaatacaggcaattacacgtgcaccaataaaggcggcttgagcagttccatttatgtgtttgttagaggtaaatgctcagctttctttgatgctatgcttagagaactttatatcctgtccttaattaaggatgacatatagatagctgagtcatggataaaatatggctgggtctagaaagcataaaacacaattttcttggttagttttcccgcatcttctgatacacagtggcttcgggtctgactgcagctgaaggtcttgtaaggctgtgacgctcttcctaatgaggttacaatatggtttagcccatttgtcctggtggtgtcagtaaactctgagaataaattaggccctttgggaagacggcattttaatgccttgagatcccagatattcccacttagtaaaaacacttcggggaactaaaggcctctaaaggccccaaacagaccaaagcttcaaatgaattgacccacttttagagagtaaattccagaaacaattcagttggttaagcaccctctgtccttcctgagttcttaatagtagtcagttcattcatttaaaaaattgtgacccttgagaaataaaaggaaaatgtgatggttggatttctgtacctcatttcctgtgatgaatgccgagattcatctgtgtttgtgcttttaataaccttgtcagaaggaggtttcctggtggggccagggcaaggggtaggggaggggtctttttgttggtgtaaaaactagaatacttaaagcttaagagacataccaaggttataggaggagaaatagtttcagttcttgtcctgggtttgcaacctcatctgtgatattgtggaagaagatccaataaatttgtcctagattgtgaatctgagtaacctctggagtcacggttcctcacagcaacacttggataagatcacctgctctgtcttccttatataattgttttcagggagacagaattaatgcacattctagctctatggaaggttagtaaaattgactctcctgttctctataaagaaggttgccatgaaactgaaactgcctctccttagtttatcttttagtctttcctgggtggatagctgaaaagaaatacatgttcacaagccatagctagcctctgggtatgtttccataattgttgagccacccgtgttctgttctttgacattcaagaaggcactccgtaatttccaggtggtaatgaagtgtcattctgcttattaataggatgggtagaggtctgaataaatagggaaactgctgcattagccaaatcagtctcacagagcgctcaggttttctttataggggaagtcatcctcaataacttagagctatatttaattattaccagtttaagatgtttagatgcctatatagtttgtcttatggcagtgaaggaaatcggggcattagctcaagtgactgagaaagaataagtgggaaaataaccaactatagcctcaaaccatatttcagccattatgagataatttatttgcagaataaattagttaggctgggaggtgcataattcatttaagaaaactctttgaaaattggtcaaaattatatgataagtggatttcaattatgtcattggtttatgtggagcactcaatttgcatgtggaaaggacatttaaaaaacattttagggacttccctggtgatccagtggttaatattccacacttccactgtagggggcatgggtttgatcccaggttggagaactaagatcccgcatgctgcacagtctggctaaaagatgaaaaaacgttttaagtgtaatctgttggctcaaccatgcgtctgtatgatcattacacagtttagaggtggcagcatattgtgtgtacagaatgaggtttgtatagaggtcccagtcggcctaaggctttcccagtccatgccaggtatcccagcataattactaattgtacctctttcacgtccaagtgtcctggtttggacaatcaggtatttgccacagcattgctgaacctcgtaagcttcctttgtgcgtatcaatttatttgattgccagaaattctatttatacgtatctttcaaggaatatgaatagagcacagaccacatgttatttgtactgtgtggccccctgatagttttctagattcttttcagaagctggagggtcctggatactgtgaactccggaaagaaggtcactcgggttagtggagaacactttaccccacactactagatgtcatcaggctgcctattcttggcctatgttctttgcagtgttatccattttagaaaaaaagcaaatagtatataaatattacaaatatttatattcataaatataataaaacatatgtataaatatttatatttataatttaaaaataaaatttaaaataaaaataaaaattataatatttatatttataaatattatagtaaaatattcccagagttttaagagctcagattgtggtatcagtcagacctgggtttgagttctttctagtcatttctgggccgcatcacttaaggagagttgctagttttgagacttcggtttatctgtaaatggtgataatgatagcgcccatcacattataggtgttttgaggattaaatgagaaaggtaaatgtgtaatggtccaatcttagtgactgacatatggtttaagtgttaccttttccttattagtatagttcagataaattctactttcatttgcaaagaataaagtcagcagccatttgggctactggggatttttgctgtgtgagagcttttttttttttttttttaattttttggccgagccactcagcatgcggaatcttaattccctaaaatggcaccccactccagtactcttgcctggaaaatcccgtggacggaggagcctggtaggctgcagtccatggggtcactaagagtcgggcatgactgagtgacttccctttgacttttcactttcatgcattggagaaggaaatggcaacccactccagtgttcttgcctggagaatcccagggacgggggagcctggtgggctgccgtctctagggtcgcacagagtcggacacgactgaagcgacttagcagcagcagcaaccagggatcaaacctgtgccccctgcagtggaagcatttgaccacaggattacaagggaagtccctgaaagcaacatcttagatctttataaaatgtttttattgtcattttatatacgtgctgtttgaaatactgattgtcggttatgccgtagaccctgagaagcttttcctgattgaccttcccttgtacgggaaagaagaaaacgacacgctggttcgctgtcccctgacagacccggaggtgaccaattactctctcacggggtgtgaggggaaacctctccccaaggatttgacgtttgtggccgaccccaaggcaggcatcacaatcagaaatgtgaagcgcgagtaccatcggctctgtctgcactgctcagcgaatcagaagggcaagtccatgctgtcgaagaaattcaccctgaaagtgcgggcaggtacaggcccatttgctttctgctaggtgtcggaacatccattgatttaaaagacttctcactggtccatcttagtatgttggtcactcaggcggctgctctgatcggttctcccagcctcaaagtaatgccagctgcttgtaaattctttatttcacatttctcatactgtatgactggcccaagacccgcctccagctgggtgggtctaccagggaagagcaattagatggtcctggggacagtcattaaacctactgacatgaggacatcccaaagtttcgtaaatgcacagtgttcgtttcaaggaaaacttattgggaagccttacactgtttgaaaagattagcatacagattattcactccttgatttactgttgatctgtgaattgacttcctccttaaatatttaattttaatgccttcttagactgttcacaatctgagaaggaaagtaccagctgacaatggaccttgttatgaatttgacatgaggtagaatattttggtagctggaggatacctagaattttgtatttcagagaacaactaactcaataccagagggcatttagctattgagtagttatcgttaaggcttttgaaaagggttctctttggagttaaggaaagtttgattgtttaagacctgtcattttaagaaataatcaaaatattaattttacagtacatgggaaagttgcctgtttggttaaaaggatgtaattagttgttggtcacctcctcatgaaaccatcacgtgaagtaaagataaagacagcttcactatgctagggtttctacctagctttgttcaggattattatcatctcaaagtagacattctctttttcactctatattaatttacttgagggacacacagtttaattcctgatttcttcaagtacacaagtaatacagataggttagtgccatactttatattttacttaaaagaccacagagtgagctgggcatggcttaggaaaaatggtaagttaaaatgttaagttacaggcaaccagttgtttgagggccacttttcattttattctagccatcaaagctgtgccagttgtgtctgtgtccaaaaccagctatcttctcagggaaggagaggaatttgcagtgacgtgcttgattaaagacgtgtctagttccgtggactctatgtggataaaggaaaacagccaggtgagtggagtatcttctccgttttcctcaatgtatcatgctgtgagggaggtttgaaggcttttctttaaagaagtgttattttttttaaaatgtattttattgacgtctagttgatttaccatgttgtgttaatttctgctgtacggcaaagtgattgtagtacatatatatgcattctttttcaaattctgagagagtctattaatcatcctgaggatgctcagctggtgtgtctgttagaggtggacctgtcgagtgtgttgagatgcgtctttccccatttcatagcaccataggcagacatgtacattcattatgagtaacaaacaaatgtcattttataaatttattttgagaaaattgaaaactgtagacttactactctatactgtttctctgaatgactttagtggggaaaattttttaaaaaattaacagttcagtgaatagctaccttgatttttataaagttattatggaaactactcaggccagattatttaaaatactgtgaaaagttgccattttccccttccatattaagaaacatgatcttagatattaaccaggaagcccttccctcccccatgaaaaggcctgtccatttgagaaatggatttctttgtgtatgggtctgatttcctcctttgagactgcttacctgagatcaggttgctaatggttttctctttgttttagttgctattaataaaatggttatcttcaatatgaagcatttggacatgtttaggttatcattcatttgacaaatgcatattaaatgtctactatatgtcagatactgtgttaggcatatcttaataaattttggctggttatatttgaagggttttttccctctgaattcactcacattaatagcaaggactttgaaatgtccagtttccctagtattttgcttttaagattcccattggctgatttttcaataatatctgtttgtataatcttggccatctagttaatttgctatcatagtagtttttcttcagtacacacatatgtattacattggaaggaagaaaatactgtcttttcttcttcctcttcctcttcttcctcctcatgctctgaattggcaattttatgcctgtttagagaatcctatgctaaataagtaaccgtggcgattagcataatgcaaagcattatgatggtgttcctgcagacctgtgatggatgataccttgctaagtgaagtctgccattgactaggagaatggaaccaatgtctccaagaaagaagtcctagttttcatatcatataacctaataaaaacaatagcttacatatggatttttgactaaccctatagaacacaatcccatattaattgcctttctatgatccttgatttcagatgagagaacagtttagactgtgtgtgtagctgagcctctgtataacttgaaaattagtctttctgagatgagaaataaattgccccaggcagttttgttctgaaccattttttcccaggagccctgcttgccattcccaattaatccactggtgctggtagataaggctgcagtgttgggagctctttggggaaatcccagtgcgtacctccaagggttaaggaaaaccaaatcacgtgcaaacactatgtaacgtgtgacttgcagatggggctcatggctgaatgccagagttcatccatgaatcttttgctgacatcctttggcttaatttggaatacttagtgctattatagcactatcaaattatttttaaaatctatagaatttgatttgaatcatttgggataagtttaactcacaatgaaatttagggtgaactgagtgttggagagagcttttgcaattgtttgttttaaaatgtaagaggatcttggagtttattcaacacggtaaatcttggttagcttttctaaggcttataaactctcatatttttactgcttttaatcatgatctctgatagtatcctaaattatggcctccaggtttggatgttgatattgtatcaattattgacaaactattccttccagcaccagtgtattcattgtcctgtttagctccctaacaatggactcctgggctcttgcagaaactagagtgaagattcggtaaatgtagaatatagtatgtgacctgtccatcgtctctctgcctttacagaggagaagtctgtaacatgatggactaggagaggccagagaaaaatgtcatttcccctttgtctcttcttaacaattgctgttaggcagcaaaaatgtcagatttctgccaattattaggagaatctcttagaagggaatatcttcaaatcaacacagtgctcccagactagaaaggcctttaaagacttttattctcttattcatttttggaaataaaatttgagaccatagtggcatccttgacttggccaagatctcacagttagttaaccaagcaggtttctcttctttttatttcaaaacatttagctttggcagtcagcttttatgtgtgcttattttagtgtaaaaaaaatttctaaaaatataataacatgagaaaaaagagaaatagctataattctgccactgtacattagcagcactgtgcaataaaaatagaatgtgagcctccaatgtaatttaaaattttctagtaggcacatgacactaaaacaaagtaaaatcaatttttaatgtatttagtccagtgtatccaaaatattttctcatgcaatcaacataaaaattattaatgggctattttatgctactttctttcatattaagtctttaaagtctgggacacattttatatttacaacacccttcagtttgcatttcaagtgcttgcagtctcatgtggttagtccttataaatgctatattgcccacattttttcccatgtttcttttctctctgtccccatgcatatgtatgaacacatggttactgtcttaaggtatactcattctacactttttacataaaataagcatttttaattttcatgtattcatagtctttttgatacctggtacacactaggtcatctctaatttttcactgcagcaaatatcttgaagcttttgtttcctgttgagttgtttctttgagataaatttgctggagttgatcagggctctgaacatgcttcctagttgctttccagaaggattgttctgctttacagtactgtcaaaatggtctaatgctaataggtccaccatagcctgtacagggagtcacccttgatcttgttccatgtcaatatctgctgttgttttggggttttttagttgtttcccctctccctcctatccctccccattgtaataggaatgtgtaaaaaaaaaaaattggaagatgcagaaaactctgctattccatttcattttttcagagaatggttgtagtttatattatggtttttttccccatgaggtttccatacaagaactctctccatgtcttatgtgcagacagatactaacagtaggatggtgatatcacaagagtaaatgcacaaccttttttcttcagctcatgtgtaaataacttggggtttggtcttacatgtcttatgtacttctgaatgctctttaatagttgccaaaattctgctggataagaacaataggatgaattttcaagttaatcttagacattgtaaatttacttttattattgaaaataatataaacaataaaatagaacatgattattagtagtgatgtgttttctttcaatcactgggctatagaatagaaaatacataaattccaggcaagagtactggagtggggtgccattgccttttccaaatatgtatataaaacaggaaatattgataggatgcaggtatgctgacttgtaaaatatcagtatcctgtagtatttcttatatactagcttttaaattttggcactgttttttaaaaaaatgtttagcactgcagagaatttggaattacgtatgctgtgattattaagaaatgaattttcatgttttttcccaatcattaataatgactatctttcaatataatcctgtaatatgaagtgttccagtgacagacttgtcatgatgttttattattcttacttaagtagtgtataatgaatgctaatatggagaagttaattgctgctatttttaatttatctaggaaagatcctgaatataaattgtatggtaatctttgatttctttcttcccctccccttctgagagcagcagagtaaagcacagacgaagaagaatagctggcatcagggtgacttcagttatctccgtcaggaaaggctgactatcagctcagcaagagtgaatgattccggtgtgttcatgtgttatgccaataatacttttggatcagcaaatgtcacaacaaccttagaagtagtaggtaaatatctctgggaatgggtaaattacttggcacagtgaatgaagaaattacctaatagtttcctttttacattaatggaatgttaacagattcttagggattttggtatcactgaatgaatgaatgaatgaatacatgaaaaaaaaaggtcttccaaccagagcacaaaagcaaatcctaaccatttaatagaggcaaatgaaaagctgtaactgtgaaggtgtttgaacatgtcattctctgcttaacccccctaccccaacaaatgtaggttgagcttttcctaaaattttactccttgctgaatgacctgagtttggaaatggatggagacttttttctttggagaaagatgtgtgcttagaccttaatgtatttctctggatcttttggtgaggttcttcagccttttggtttattgttttatagttcatgggctctagtcacttggcagcagaaagggctggactgacttttccttctcagtatgcccctcaccttaccctgtcctctgaccctataggctataacataaaccttcaggaaggcagcccactgggcatggctccttgtttctacagagcataaacaaacatgttaacctgtgccctaacctatatcataagtggtatacacaactggtttagttttccctgatctagcaatcttattaaatacttatttcccaagcatctacttaatgagagcagactggtaaagtacatgatgtttttgagttactggaaagtctagtaattttataattatttcttttacactttttgggctctcagtattgtttgcatttaatctattttcttggtgtttttttttttgttttttttttgggatgccaccgtattttcattgcttgattttggttaagtacttatagggtggtgaaattcttcctcataattttatcaataataaaattatatatttgttttcatttctctctttcccccatatttcttcaataatttatgtaacagtgttagaggtttgcagtttatcctacaattatctcatatgagttaggtgtttctgctcatgttgtaatggaaagtgtctcaccaaaatgaacgtgaaaaagatgctttatttgcaattacagagctagcccagagaaagggtactattctgtccctaaacatgattgtgaaccatttattaatttgaataaaaggctatgcttttaaaatattaaactccataagtgctaatttgctaagttgattagggagcatgctgatatatcagcttcagctccagaaagcaattagtaaggatgttttgagcatattgttgtatgtaatcagatttttaaaatccattcatcaatttccaagaatataactgtataactggaaagacttggggccatgtaatctgaatctgtactgtttcgggagagggttggaatgggacaagagcaggaagagacaagagaaaagtgatctttaggggctgggagtagaatttggacacagagtggagtgatgtgcagcacaagactttaggatgacccctacctagttttgagttggggctctaccacttaaatttcaaatgcaccccactttaactctgcctctattttctcttacgagacacacaacctctaactcccaaggctgtagaagggagaaaagcaacagatattatagatgtgcctggtatagtgtttgaacttgattaactgttagtgtctcatcagtttcttaaaccatcctttataacaagccagataggattttttgattctaataattcttacacttcatgaatttgaaactccattctattataggacataaaaccatattgacgaaactagactgtagaaaactccagaagaactagtattttgttcatgatgattgtgacagaaatcagtgcaaataataatgcctgtgatatttctatattttgcattgtgttttatctttgaatttataaccttgagcacctgaaaatttaatgtagctttcagataaaacatttatttcctcaaaactaacttaaattagcttaaagaatgacagaggggcaccatttatgattcaggtattagaacaagctgttggtttccaacttgatttcatttggatgttttttaaaatttcacctgaaaaatgtttttcccttgatacaaaggacagtcggattcctttttttttttttttttaattctgaatctgtaggaaactaaacagtaaatattctaatggcaacctcctgtggggtaccaattgcatgttagatgctctccggaggatatctactcagtaggtggtagtggtttagtcccaaagttgtgtccgaattctgcgacctcatggactagcccaccaagttcctttatccatggagttttccaggcaagaatactggaatgggttgtcatttccttctccaggagatcttccccacccagggattaaacctgtgtgtcctgcattgcaggtggattctttaccgaaggagacactagggaagcctggagtgtaaatatatttgactaaatagtaccagagacagtgaatgacagtcttaaatgttataattccatcttaaattttgaaaaagaaataaaacagtaagattaaaactccttcatgattccactaacttgctataaccatttttagggtttggtatatggtttatggacttcctggtggctcagatggtaaagcgtctgcctacaatgcgagagacctgggttcgatctctgggttgggaagctaccctggagaagaaatggcaatccactccagtactattgcctggaaaatcatcctccttgcagtccaagggactctcaagagtcttctccaactgcaacaggattttaattatacgtgtaatcttaggttctctttctcacttaaagtatgtggagactctagggtatgctacagtaagaagccggcctcggcctctcactgtgtatattcatgtttagtctctgcctttgggtagccagctatatggctttgcaggacttggtttcttttctcatctataaattaagggttatgaggttctctttcagtattgctgtaagattaaatatttgtcataattattaaataaatatgctaaagaatctaatgcagttcttggaacatagtaaacatttcataaaaggaggttataaatataatattggcaattattttattatggtctttttcaagctcttcattgtattattatataaccatttctaagggctgctttatttacttaaccagttctcccttttctcatttttaagattattatgactagggtaaatagcacttctattttgcatgtagctatctacctcactaagaagagttctctgtattaaactgaaaagtagataattttttttttatctagaaatgctttctaaaggagttgtgccaaattacaatgtgtaattcagcatgctattttaattacacttgcaaaattattaagtttatttcaaattagctttgctagttttccatagaatggatatacattatttttaacagctctgttgaagttttgctatttttaatatgtgaaacgggatcccctatttaaattactagtttatttttccttctatattttcatgtcttctttttcctattaccttaattaatttttctatatgtagacatttgaaaatgtgtatgtattcagatttgtcttttataagttttatttttttgattgcttctaaaaagcctagaaaactgccccacccccacccccagcttggtcaaagtttaatagaagtcagttttgttgtttagttaaaaatatggcttaattgttaaaatgctgttcttaatcatctgtgatgtatgatataagagatctaagtttagttttctttaaatactaaattacattcttccaatatttttattgaacattgaggctctcttcccctccttgatttatgacatcttcttatcacatacaattatattgggtctaggaataggctacttagtccaaataatttttagcataatatgcatcaggactagtagttctaaaagacttatcccatggtgatagatctttaacagagttgcttaagagataaaaataagagaataaacatttccaatgtgtgttctttctcatttatgactgtgattctccaagagcaaaacaaaatgtaaaatggctagttaaaattcttacttggtatgctaagggtgtgctaggtaactgcagtcttgtccaactctttgtgatcccatggactgtaccctgccaggctcctctctccattggattctccaggcaagaatattggagtgggttgccatttctttctccaggggatcttcccaactcagggatcgaacccaggtctcccgcattgccagcagattctttaccatctgagccacctgggaagcccaagaatactggagtgggtagcctatcccttccctaggggatctttccaacccaggaattgaaccagggtctcctgcattgcagggggattctttaccagcctatttggcactaccagttaatactggaaatcagtcagttacctttataatccaaaaatgaagctgtgttatttgttaagatttttgcaggtaacagtttctttctgtttcattctgctgtggttagataaaggattcattaatatcttccctatgatgaacacaacaatatttgtaaatgatggagagaatgtggatctggttgttgagtatgaggcatatcccaaacctgaacaccgacagtggatatatatgaacagaacctccactgataagtgggacgattatcccaagtctgagaatgaaagtaacatcaggtaagaaaagggccttttactggcaattatgcagttctacctttccccttcacttgttgtttcatcactaactcatgtccgatttttttttttttgaccccatggccttgtagccccgctaggttcctctggccatgggatttcccaggcaagaataatggagtgggttgccattcccttctccaggggctcttcctgacccagggactgaaatcccatctcctgcagtgtaggtggattcttaaccgctacctcgtccatttctgtaaccgccaatgtatgagaaaatagctgatacagaaggaagtttggggctgctccctgagtcttcatcatttcattttgccatgcgtttatagagcacacaaaattccgtgcctcagctgtctcatttgtaaattagaggagagtcttgtcctagagttctgaggataattcagagcagtgactagcatatactagggccacagtaaataattcttttcggagaaagaggcacgttagtttattgcctttagttacatttttaaagctagaaggaaactaagaattgttaagcacctttgggccaagcagtgaacccaagtttcttttacatcagacttctcattcgattctcaaataagttgtatgtgcttgtttctggccatacgctgttctcattcccttatgtacattaactcaataattttagtcctcacaaatgctatgaggaggcacgcttacttccctcctttctttagaagaggaatttgagacttcgatgagttaagtaatctcatcaagagccagtggcttataagaggttggtgcctagttacaattggtgttttttttccccctagttgggagctcttggctgttgtgaaaatatgggtgagagaggatactgtcctggaccaaagtctaagggctggaggaaggaggatggattgggtgctgtccaggcttcgtccttaaaggactccgtgactgaaggggcagggaagagggaggagtctggctggggcagccagattggatgataagaggtgataccgttccagtgcgagggagaggggcaaatccagtgacctgagtttggggtttgttgaatttgaacttgcctgtgggatcttgagtggagatactcaggtaggatgttttgtaggtcaggttccctggatgcagctcctgagagtgggattcacaggcaagggcttcattaagaagagagagatctggcagagagttggggaagtagggtagggagggggaaaggagggaaagaggatgtgggtgagctgcggtcctgtcctaggggtgctttggactggggaggaaaggactgcttaggtctggagaggaaagaggcgtaggacagggaggttggactagaggtcaggatttgaaagttgtaagcaacagtaagtagttcagaggagcgtgaatgcccacggaatgtatgcagtgtgacaggagcctgaacaagccaccccccgtgcagagttgattgtggcccttgggggtctagggctacccagagtgctccgtccacactggagcccatgtcagtaactccctgatgatggtgctgaacacagccacctgtgataaccttggtgtaaaacagaagccccggtagcacatgctccgggggacacttggaagaagcggcaggggtaggaggagaaccaggagatgctggtgttgtcagagtgaaggtgagggccatggtattgaccttgctgcatggccctgaagtgtctgctttgagacaccttggtggagatgcctgccagtctggggttttgccaggcaggtgctgttaaagtagggcaagtgagttcaggacactggtgagagggaggctgaaaagagaccagggtggggaaggatgctggccataagaacagcacaggatgagggtgaggttgccttatggtaagaaagcctttcccgactctgttctcatataccaggcatttgtctcaatgaaatatatgtgtgtgtttgcatttgttaacgtggattttgttaacactgaattacatgggatgtagttttccaaaacaggcatggatttccagatggaaactgaaaaagccacacgtttcgaggtaggtgatccccaggtgactgatgggttgttctttttttgtagatacgtaaatgaacttcatctaaccagattaaaagggactgaaggaggcacttacacatttcacgtgtccaattctgatgtcaattcttccgtgacatttaatgtttacgtgaatagtgagtagaacaaatggttccttatctttttattttttattcttttaagttgtggctggtgtttgcaacagctgccgccccgagttcattgtgtactgggtcaataatgtttcatgataattttgaccttaacaaagacctcgtggtttggtggttggaaggatgtgtacaaaaaccaattccttgtcctacaattcgctgaccacatgaccttgtagctggcgctcagatgctgggtgctgccctttgaagtcaacagaagagacatagaagttaaaaataacagtttgagggagaatgtattattattgattgccgagatggggagctggaggttgaataggagctagattatggtattaggtgggaaagaggttctatcaagccccaacaaacgatttctttgttatagcacctttctttcagggttaggtattattttgtgtgaaatgaacgcggtattgatcagctcagagtgtccctgctgtgtaccatgcagggactgggggagaagggagcaagcaggtggtttaaggtgggaggatggccgcggacacctgaacatctgagccctgtgtggtccacgtcccacagtatctctgtacaaaggttgactgcaggggctgtcctcaccagctggggcttttctcaagtgcacgacctgctcttggctctattgtggggtcacctgcatttcccagaaagaggggcaggtgcctgccacaccacaccagcaggggaccaaaggctggaggcctccaaagacatgggattccaagggactgcccacaaaatgaccagcagaattagctatctggggtgtatggtcagggggcggtgggtgagatgacaacctgggacgttccctggaaaacagctcagtaatggctgagcccttcatatgtgttgggctgcaggaggggagccagttccccatcttccaggagcttcctacttgctgcgtggagtaattctccatcgttacctccctgatggagctgctcaccagcatggtggggtgggaagcgtgatccccttacaaatggaaacatctagtgagtgatactcaagacaggtttttggttgctaatctggagtcttttgtctgttccagcatttccaaaattgtatttcctgaaaaaaaggtgttagcgtgtatttagataaagagcatcatatccacatacagatttttctgagctacagacttcctcagcatccttaatacgctaatgtatattttgcctgctcagaaggaggcatgggattgagcatatatctcagatttgtatgaccacaaaactgcttttccaagggaaacatgttaattaacatctcagttcttcagaacagttttgattacatggtattctcattggcctgcaattcaggtatctctagattaattcagatgttaatcagagattagtgtattacacatgggcaaaattgcctgcttctgagaaatcttcatgttcaagtaattgaagagatgattgcaggtgaatcaatatccttgtaaacatcatatgcattactgtctatataaaaccttattttaggtgttctagtgcagtgcttctcaacctgatcccaaggaccttgtgtatttgtagtttccaatttgttctgaatcaatactccttaacaaaatatagaaagaactggtcactagaatagagagatggaaaagaacaaagatatataaaatcccagaatggatctttttttaaatttatttattactagactcaacagatataattaagtgaaattgctccttctcattgcttagtcttggcttctgtgcttacatactatgcagcagaactagtagattgtggccgtggtctactcgacagcctcactttgagaagcttagttgttgggaattttctaacattgtgtcatttgtatccatctctctttccctggcttcaaggtcaagggctcattaagatctctctccccctttttcctgcttccatttaccagtatgtggcctgccagtcagtcatgagtcattgaccttagaaagacatctctgaagtcacccttacttttctctgggtgacaaaattgctacgtttttacttaccagcctaacttgccatctgacaggatccatattgatcacctctgctggtgaactcatgcctatttgaaactagagaggaaatggcctgaaccttcccaaatgatcctttcttggattccctataattctggggcctgggtcacaagtactttgcagcatatgctgagctcctgcttcaagcactgggcacaaggatgatggtgtgcagtgtctcttctcgttggctaagctcttcaggggtctattcattgaagtcgcttcagacactaagctgactaaaggcatttacttcacttcacctaacacattggagttcttgatctctagatgctttgacagaggtagcatttttgtgtgaatacttcatctgtttcttgggaactgtgtccccagttgcccttcacagatataattagctaatttctttgctgactttttattttttggattgaaaaaaaaaactagttgatgctctcatggggcaagatttttttatgttaaatttaaaatcaaaagctaaaaataagtttaaaatttaaagtgggaccagttgtgtccattttgacatattattttagtgagccaaatgcatatgtagatctgctgcatggtttattctgtaaataagctgagccccaagggtgaaaggaactgtgctctgcagaaactagaatgaataaaaatcagaataataaatgcatgctgttagtgtaggaattcaggctacttttagtgacagggatgcataattgcttaatagattcagccatgagaaatgctcaaggaaatccttgattttgagtagttaaatatttggtagttgaagacttcatttgctttgaaaatttgagaatattgtacttgtgtgtatttgtgttttaatcacttacgtgggaggctttaagagaaagctatatacatttaaactttaaaatgttttagtactatctttagcttccctaacaaggcatgatttgcatgggtctgttgactcagtgaccttaaaggtggtttgtaatggccaaaaaatgaaacaaaaaaatcggtgattctttgccttcaacttgcattgctataattattcttgaattgcttattgaagatgtatatagaagtcagattcttaattctaaaaggaagtttcatatctttgatgaaaacggccatttgtttccatttcagatcaaaatttggtgaaaaatagggttttaggaactataaaactacccaaaagtgttttcttaatacacgttaccctttccaagattcctgcaggtgttagaaaaagtgataacaccaagattctgtaggttaggtagcctgtgatggttgcttagaaatctgtggtctctttggtgactcatagacttggagaatgaatttaatggttgctggagagaagggcagttagggagtttgggatggacatatatactctgctatacttaaaatatataaccaacaaggacctactgtatagcacatgcagctctgctcaatgctatgtcgcagcccggatgggaggagagtttggaggagaatggataaatatattggagaagggaatggcagtccactccaatattcttgcctggagaatcccatggacagaggaacctggtggacagttcatagggtcgcatggcatggatacatgtaaatataaagctgagtcccttcactgttcacctgaaactatcacagtattgttaattgagtataccccaatagaaaataaaaaggttacattttttttttatgcaaaaaaatataattatagaaatcttacaaattagcaaaaaaaaaaaaagcggtggcgggggagagaaacttatctctttggtaaaaataaatgtcatacaataaaggtttttaccagatctaggacaaataaaaggccaaacacgtattttaaccctaattaatcctgattctcgacttttctgtctctctcttatacacaccacattttctttcttcattcatccactgacggagatttgcattgttttcatactttgattgttgtaaaaattactgtggtgaacatgggagtatagatatccttctagataagaaaaaggtctgcattttccataatgggtatagcaattatattcccaccttcccgttatgttaaggaaccagaagttttattttctccgcatttttgcctatacttgttatcttttgttttttttgatgataaccagattgacagatttgaggtgatagctcattggtagttttgatttaccagtaacctagaatgacactggtagcattacatcaataaaatgttatctggtagcatttccagatccacattatgaatttaaaatttgtagcaaatggtatttggagatttctcttcagtctcaaagatctgtcctttaatgacagacctacttcagcttccctggtggctcagacagtaaagatctgcctgcaatgtaagagacccgtgtttgatcccagggtcaggaagatcccctggagaagggaatggcaacccactccagtattcttgcctggagaatcccatggacagaggagcctagcgggttacagtccgtggggttgcaaaaagttggacacaactgagtgacctaacactttcactagctgagtaaaagaatggtggtactcaggtggtggtgcagaatggccagcaggacaagaaaagtctggagaatgaaagggcttgcctttcatctttgggcttacatggaacacaaatgatgttaagctcgattggatatccacatgactgctgaacaccaaattctcagaatcaccagtttcccttcatttatggcaaagtgttaacagaggggttgaaacaatttaaggaaatgctaactaatgtattattcctaaaccactgcatcacataattaacatcctgtctggtgtaagcgattatttatagatcatacagtatacccaaatcagtcaaagtaataaatcattcagaatgaggccttcgatgggaatgttccctttgaccacatctgtagaatctgggctgctttttatatatttgtggtcattgttattatttagtcgctaagtcatatctgactcttgcaaccccatggactgtagcccaacaggctcctctgtccatgggatttctcaggcaagaatactggagtgggttgccgtcccattttccaggggatcttcccaacccaggaactgaacccatgtctcctgtgtttcctgcattagcaggcagattattttaccactgagccacctgggaagcccatttgtggtcctagttaaatccagttatggacggctagaccatccttccagggagaagctccccaatgtggaataccctgcaacaacttgtgcagcccaccatttggcataggtgagtgtagggctttcacgacagccttgtagctagatggctttggatagcctgcttgccagccatctgagtcacccacctggctgcaaatctcagtgattatatttagggtaaaagtaatactatcggatttggggcacctttccagatcttcatgagtcaagagagcagagtcactaggactttgcctttttggaatatggacatgttttccaaccgcttaaccattttaaagtgataggaccttccaaacacttgagtgtccaaaccttacttgtgttagaggctagaattttgagacttaatgctaacacacttatcaagttttgcttgagaggctttgctttttagtatttttcttttcttttttctggttgttgctgctgctgccaagtcgcttcagtcgtgtccgactctgtgcgaccccatagacggtggcccaccaggctcccccgtccctgggattctccaggcaggaacactggagtgggttgccattgccttctctgttttttctggttaggtggattttattcaacctacttctgtgttaaattattggagttcttcaacattaaataaagctagtgctacaaagataagtgctaaataaatcagaactcctttctgatttatttacttgcttttcagagtttgctgtaagactaccacagtatacccagaatgaggcctggtttgtgcctcattatacacttatacacatttgtttttagattaaaacaatgttttcatattagaaaattgttatatgacaggtatgataacttgaaattataagtaggcaaaaataagaatgaaataagtttaattcttccttttaaagttgatttacattttatggattaccagtgctaatatatctcttttaatatatatcttcacagaccacttaaaaaaactttttttgtgggggatgacaaaaatgaagttcttttgcatcaccttgtgttttggtgctaaacagtgaactcattgtgagctgttttccatgccgtaagatttcttctacagtgctgtgcttagttgctcagtcatccgactctgtgatcccagggccatagcccaccagcctcctctgtccatgaggattctccaggcaaggatactggagtgggttgccatgccctcctccaggggatcttcccaacccagggattgaacccaggtctcccgcattgcaggctgattctttaccatctgagccacccaggaagcccagtaatcactttgctatctccttgcatggatatttcgtgatttccttaacctgtatctgataccattttgagacattgtggtgttatgaggtgaaactctgaaataatgtgattgaattttaaaagaaatctattaaatgattatttaaagtttataattatttaatctcaaatgagcaaccttactctagtggcaggaagtcaatgaggttatcatctgtcattgtctttcatgctcctatatcttgaacatatgtctaggaagataggctgtgctgacttgcaggacagttccaaattaaggaatagtgttagtatgggtagctaatctatgtaaaaatagtttcttgtctttctacattaattttttttataggtaatttgagatacttgacagtatgtgaagtctgtttttattttcttttcctgaactcgaaatgagtttttgttcttaaattgcttgggagttatgagtgttgtttttgatgtgacactttaatatttcctccttatgaagaggatctttgtcgatgcaagaattgctatagacatttaaactggaagaataaaggaatatcatggcaacctacttttaaagcagagtttgagtctcatattttaaaaaaatttaggcgtgttggcatgatttttctttcatgtctcctgagaacgttggtggtctggctgggtgtgtagctaatttgggggatctattcaatcactgaactgatgggagaacagggtaacctatctagatcgttaggccctttgttgatatgatctggccatgatttcatgtttatggtgcgaaagcagaagaggttcgtaactgcctacttcagtattctgggccttccctggtggctcacacagtaaagaatctacctgcagtgcaggagacccgggttcattccctaggtctggaagatctcctggagaagggaatggccacccactccagtattcttgcctagagaattccatgaacctggtgggctacagtccatgggggcagagtccagcccgactgagacactttcactttttcattttcgaacttcagctagaattgaccctggccctgggacatacttctctaaaaatagcctgagtagtcgctttcatatgagtggaactgctgttctgtggaaatttcctttccaattgagccccatgtgtttttacatcaaattagtctccttcggttacagatgtatacacggtcacctataatgtatagtggaaatttaaattaatccaagaataggtatgtaatttttccatgggcattgtgttaacccttctcttccacttctaaattaatgtggcaaaatgaatccactacttatacagagtagaaaaatagcactttatcacatgtctgcactcctaggcagcaattggactgcattgtaacctgtgtacacatccccccaccccaacccctgggtcactggtgatggtgctcttgtaaattgagcacagtggttctggctgaggaaggctttctccaagtagtttcatcattttttgtaaagctaacttccaggatagggagatctttttgatggctgttcagaataaggattgacaaactatagccgcctggccagatttgacaagtatcctgtttctgaatggctcataatctaagaattttttttatttctttgggatgggtgtgaggtaggaatgattttaaaaaacaaaatttgtgagatgtgaaaaagtcaaatttcagtatgtgtgaataaaattttagtggaacgcaacttgcacatttgcatacatgtctgtggctacatttggggcagaattgagtgtatgtaagagtctcataacccctaaagtaaaatatttagtttcacctttcacatgaaaagtttgcatactttttatttaagacatcactttattaggagaatgattttttttttaatgatagacattctgcaaaacataactgggtgcaaaaaactgtagttgaagttttgtttagttggttaagtgaaattctgttaaagtactcacacgccagtttctagatgtctttaagaatgtataaaacaaaatgtaatttctttaatttttttattaaaatatggttgatatacagtgttatattagtttccggtgtacagcaaagtgtttcagttctgtgtgtatgtgtgtatgtattctttttcatattcttttccattatgatttattgcaggatattgaatataattccctatgttatacaatagggtcttgtagtttatattgtatatattagtatccaaaatgtactttcaaaatatctgttctgaagattttttttttaaagtataatactccttttgtaggtaaaagttaacccgagtttttaaatacttttttagttgatttaaattcctatattataatgatattatgtcaggaatgtggatgtgacccagatccaaatcaggatagtgacaaattgctacaaagcatcactgtgttgctgataaatatcatcagacctacagttgtaaagacaaattcatccttgtggttcctcttcatttagtgttttgaaatatggacacttgggcttcccaggtggttcagtggtaaagaatccacctgccaatgcaggagatgtgggttcgatccctgggtcagaaagatcccctggagagggacatggcaacccactgcaatattcttgcctggaaaatcccatggacagaggagcctggtgggctacagtccctggtattgcagagttggatgcacacatgtacacaacacacacacacacacacacacacacacatatatggacactaaagtctgagttctctgctgattagagcatgtgggcagatgtgtgtttgtagcaagagttggtggagtcggttgctgctgctgctaagtcacatcagtcgtgtctgactctgtgcgaccccatagacagcagcccagcaggctcccccgtccctgggattctccaggcaagaatactggaatgggttgccatttccttctccaatgcatgaaagtgaaaagtgaaagtgaagtcgctcagtcgtgtccgagccggttagggtaagccaaaaactatgctcatctctttcccaccaattacttgtatacatcctcccaccccaagccccccagctcctattatctgtgctgtgttctttaaaattcaacttgttcttgccttccttatggacctgatggtggtgaaaaggaatttttttttaagatcgtatatctgtgggataaatcagcaaatggttggggtttttaattgcatgagcagtaaattctcagaagagttacaagcactctgaaatctgcctacgagctgatcagtgttgtcggagatgccagatgactcaggtccacagtgctttggaaggagacaaggctattttttttttttttatctctacaggaaatacataacttatacacctcttaggcttatctaaacctccaacttgggaggatttagggaatgtgtcatttggtatactgctgattgcagaatatctaagaaaacacagctcagatttaacctggcgaattgcagggagttatgtatctttaaaagcaaaatgtatatttaatgacttagacggtgcgttgaggcacttacaaaatgcagatgagcccagattttcatttttaggaatcagaattatacctagctcattctgtatgcattaaacatgttccttgtgcaacgtgccacgtatagccccagctgtactcgtgtaatttagccctttcagaatgaagtctcttgtcaccagcattagggacagggctggaattaggatgaggcaagagagatgcctagggtgcagaatttaagaggtgctcactcttggtgtctgcctgaatctgcaggacctggaggatgagagccttcttaaattcctcaccttaggtgtttttcttgccacatccttgtcctggccctgatggggtcccttgaagattttctaaaataaccccattctgggtcagattctcaaattacttaatcttgggggaggtgaggtgggccaggaatgtgctttttaacctcatctctctgtgctttaaatgcaccttgaagtttgaggggccctctgatcttggttggccagcctaagtgccaacaggacaaaagctgcttggcttgcctcaggttatagttgggatagtagcttaaaaatgtgcctgatgaaccagcacacaggaacaagtaggccagccggaccacactgtttgccagccctggccattgtatagctgctaccaggtgtcatgctggaaggcttggatcttagggcacttgaaaccaaagctaaatgtaattgattatgtaattttcagctgttccaattttttaaattaaaaatgttttgtaagtttattattagctgtgttcattgttaaaaaaaaatagaaaataagtcaaaagaatgaaacagatattgatgtataactctactacccatattcaacaactataaatataatacaccctttcagccccctcttttttttttcctagtgagtaatagttaatttcactaaaaatccaggaacaatgaatgacaagaggaaggttgttatgaggaaatcttgtcttatgaacttgattcccatttgaattctgtccagttggattctatccagtaatctttgctatctgtgtgtggaccttctctcatcgttaatctcagtacggaagaaaaaatccacatggccaggtttatgtgtggatttcttttctcgtgacccactattgcaaaaatggtgtaacaggaaagtcaccataggctgatattccaggtcccttcctgtgacactaactgaattcctttggaatttgaaggacttgtctctttgggaagacttaataattaacagctcttactgtgtgtctgccacaggtcggactctgctaggagtcagaagtacggtccgtaagacatggtccttgcccttgagaacagtcggatggaggcagaccagtttattatagaagtgtgtcaggtgctctaaagtgcttcgggagtagggaagtgagaccaaccaacttggctttggagagttgaggatggctaggaaaaggagatgacacttgaattcagtccagagagacctgccgtatggcgcctgccgtcttcagcaaatagcattctcctaaagttccactattttctgtgttatgtcctacttttcagcctggtcacacagttgcccatgataattaaatgaaacttgccagatggacgctttcgcaagacgatggcttgtcttcttgctctatttgtgaaagctggcgttggatccaaactctcaaggatgcccctaccttgagattgcttttggagtgttgctcttttgtgtgtattagccaaatggcctgcccatcagcagggccaggttgaatgacaggtgggtgtgccatgcatgcagacactttgatccctgccaagccattttgcctgcaaggagatgaggtgctgagaggttgttctacaaagatgtcatttatcagcattaccttccttcgaagaaattagtttgtgacctgttggccttttcctctgaccaaatatatttatttttcctatcagttgcaatgtaatcaatgtcagattcccagttcttcaggttaaaacacatacatgttatcatgctgtcttaagcaggttttcttcaatatctaatatctttatatattgaagagaatatgtagagtgaccgatacagttaacttaattggtaccaaacttgattaacctaggaggatgggtactctaaggagaaaaaataataaatgagtagtaataaattagtaattaatacttaaaaaaatttttttgaaaatttatttactggctattctgggtcttagtcaaggcatgtgggatcccaggccccctgcactgggacatagggtcttagtcactgaagcaccagggaagtcccattaattaatgcttttactgtttgatttctgtgaatcattcttgattctttgtcaagaatcatttcatttcattgtcacaacatcactatgaagaattcctgttgttactattgttattcccattggatacccagagacttggtggacagcagagatccaccaaaagccagagcttgggtacagttctgtctaccacacacatggccacccgtagctctctgcacaggcctggggtcggcacctgcgatgctgtaccagggatgcaggatgagctcatcaccgtccctgccatcagatgcttccagtgtagtttactcattctcagagggttcagatccttcaagtgtattaccagtagaacagctgaatgtaagttcttttcctgttcactaatctcaagaatttgcagggtacctttgattgaatatctgttgattattatagttacacagaaatgtcaaattagagcattcctgctgatacagtttactttttcagtgattgtactcaggtttagacatatgtatgagtaaaactcttgggctggtttcctcttctaattttctattcctatcctattttgcatttgaaataaaagtttggagttaaaagcccatattgtgttttactctgatgttttggcttctctttaaaggggtgatttggctccttgtctgcaccatcccttccatacccccatcaaaaaaaggaggggggaaatttccgaggggggggtcttatctcttcccgtaactcctaatttcttctagttcttgcagtaacttgaaattccagtgagattctgatggcaggaatactttaataaacagtgttgttaagtcacatctgactctatgcaacctcatgcacaccaggcttccctgtccatcactatctcccggggtttgcccaagttcatgttcattgagtcagtgataccatccatccatctcattctctgctaccctcttctcctcctgccctcaatctttcccagcatcagggtatattcgaatgagtcagcttttcacatcaggtggccaagagtattggagcttcagcattttcacctgttagacagttgggaaaccctagaatcctgattagaacccatctttcaggttcaccatccctgggaacagaaaccctgccaggtgatcctgcaacctcagtcatccctgacgcagggagagctcagagacccccacatccacaggatgaacagtccacatggcggctgggtagctctaaccaggaaagcctttttcttggtcaaaccttcacatccgcctacctgtaccttccattcactggttcacattctcccctttgagcaacatgttccctcagggtccccttaatccttgagaaagtttttaaaaattcagaaattgtggagggagccttgatgaggtttcccagcagtctgacatatggctgcttctctcttcctccagcaaaaccagaaatcctgacgcatgacaggctggtgaatggcatgctacagtgcgtggccgcagggttcccggagccaaccatcgattggtacttttgtccaggaactgagcagaggtgagatgattattttggataccacttaacactcatcaggaagactgcaattcagttgaatttcaaatatgttttcaaagtattttttttttaaactttgttttgattaatttttttctatccacgtggctttttagagagcataattgctatatttttcttggtagacattaattttgtttgctgaaacatgattactgaacgacatctttattttggtggttatcttttggatttatcatgcaatttccagcctgcaggtagataaagcaatttcccaggacagagtaattagatttccaatatatacacaggaggtaatatgtgtgggaaatgtgactgtagttatcatgaaaaaaattacctcagaagttaattgccaagttaccaaaaaagtaacgatcgcacaattaccatacatatggcgctggggagctacatgttttaaaaaggttttctccttgatgaggtgcccagcccctgagcagaatgcatctggaattgtacttcctctctttcacaatccacacttaagccttaaattgtcctttcgcattacctggagatgaaaatggggtcagcttcactgtttttatccatcaaatgctatttttcgttcaggctttaaagcccagtgtaacatcacaactgagtagtcaaaataataatcatttttcacagaacagctctttttaaaaaaaataaacagcaagttggagaggttatgtaagactgttgttctcagctgggttttagttgagtgttttctttgggggagaagtagggaggttcaagacccctggaaagtttgcccaccggggacacagccccagtagttgtagacattcgctgagaaaatgtttatggaataccaactatatgctggacatgggtctagtgaacaaaatacacctgagtcccattagtgagtttatattctagtgagtagagatggatagaagactgacagctaccatatgcaggtgttacgagccaagggagaaagtaaaaccaggtatgggaacaaaattgctaggcatgtggaggggataatttaaaatagagtcatctgagtccggttcctgatgatctttgccccctggagttcattcaacccagcaggcactatctccatctccctccatggcactttgagccagagcatcctcacttccagggtgtgggggtggccctgtcttcatccttatagactttattgctttcctcctccaccgccttccttttcaaccctgcatacatctgttcacaatcactttatttataaatggctgctgtgtgcagggatgggagccaacggtcttactgaattcatctctaatcctttcagtaaccctccaagatgggtattactaccccagttttatagctgtaggaactgagtcttggagacttaagtactactcacaagtcaacagggtaggtgtttgagtccggatttcaaacccacatctcacctcaaaacctcttccctttctcctcttccaagtgcttttctttctctcggtggcacagacatgttcatttgtcatcacacttccacttgtaaaagggaatatctgattatgaatctctgacttggttttaaaagtatgccgtatccaatgtattcaattgattttctctgagagtaagtctgggctgctgtttctcccacctaggtgttctgttcctgttgggccagtggatgtacagatccaaaactcatctgtttcaccatttggaaaactagtggtttatagcaccattgatgacagcacattcaaacacaatgggacggtggaatgcagggcttacaacgatgtgggcaagagttctgcctcttttaactttgcatttaaaggtaacagcaaaggtatatttctttttaatccaatttaaggggatgtttagactctgcctgccatgtcaatcatgacttttaagtccattccatcactggcatgtcatgtccggtaatatctacattacgcatgcgattgtcatcaaaagtactaagtttcattctgtgctagttttttaataaaatgtgtgcagtaaccatgcactttatgtgttttatgtattttatgcgtgtgtgcacatatgtatgtatgtgtgaatgcatgcatgtgtatatgtataaaattaatcatgtatttccaactgtttccattagaaaagggtagagaaataaaataggggaagtagatttaccttatacccaaacagaaacagaattaggacaattaaatttaaattcaattaaaaattatttacattgttacttaaaatcagttattttaacgtatcaccagataccttgttagaaatttaacattaccttttgtgaaatcatgttaatgagctattttcttttaacatctttaaaatctgacatgaatgactagctctcccaacataagttaaatgatcctgtagacaaattgatgaattggtatgaagttggaagacaaaagaactgggtgcatacattgtaggattcggtttttgttttcttcagttggcaaagacgagtgccaaaaagtggtatttgttcggtatttgagtgatgaggagaagagtcttatattgttcttcatcatggctgtttttttttttccaggcagggcaatgaaaagaacactttaaaaaatgtttttctcagttgtgaaagacactcaatgctccatgtagaaaatttgggaaatacaggaaagcataaagaataaagtaataaaacatccataaaggaaacatcttaaagttaaaggcaggaatttgaagtgcaaagttcactcagatgtcactttttactgaaaaactgcctaatgttattcttgtgctgtggaaatctcaacttctttcccacagttttctggttgaaagttcttatgttaaaagattcctagagtaagataatagccaaggcagggagctcagatgcacctggtttgactcctgctgtgatgggtggtaggtagtgcgggaggtgggtgagttggaggtaagaggtgttgtgtgaagatccaacgcagctaataggttgtgattccacatccctctttaattttagaacaaatccatgctcacaccctgttcacgccgttgctgattggttttgtgatcgcagctggtttaatgtgtatcttcgtgatgattcttacatacaaatatttgcaggtaaccatttatttgttctctctctcaaatgctgtaatggcagaaccattaaccattaaaagatgactcctctttccctttctctctccaccagaaaccaatgtatgaagtacagtggaaagttgtcgaggagataaatggaaacaattatgtttacatagacccaacacaacttccttatgatcacaaatgggagtttcccaggaacaggctgagttttggtcagtatgctacaggggttttccatgacacctttctgttttcacatagcagtgcctttagggaatcccaatagctttctttattttatttcacctgtaacagtaaggtttttttctgcgatttcactgcctttggtagatttagcatcaagtacaccttagggaagtgtatcttgacacatttgtccctaattcctttattggttttgaaatgacacaaatgtttcttcagttccaccaccaccactttactctcttgtcttccttcctacagggaaaaccttgggtgctggcgcctttgggaaagtcgttgaggccaccgcttacggcttaattaaatcggatgcggccatgactgttgccgtcaagatgctcaaacgtaagttcctgcaggctgttatgggtgctcaccgtcagtgtcccagatttgctttttgctaaagtaagatgtttttaattttagcaagcgcccatttaacagaacgagaagccctaatgtctgaactcaaagtcttgagttacctcggtaatcatatgaatattgtgaatcttctgggagcgtgcaccattggaggtaaggacatggccaacctacctcttgtaattggtcaaagtatcaaaaggtgggagattttgatatgatttttgacagtgcttgattataagctccttgcaggattttgacccatatggttaaccttttgctggatttcccccaaccccactgaatgttaagaatgtatattttaatgtatataagaatatatggggcttctctggtggctcagacgataaagaatctgcctgcaatgcaggagacctaggttcatgtgtcttgttcttaagaactatattttgtgtttattgtcatggggtagaacacccaggacatacctagttactgtcatgtatatcacaccaacattgacctcttgaatatcttgagaatgtctcatctcctccagaaagcttttcttttatcttgtgagcttttatataggctggatgactctttagccactaaagagttaatgttcatgtgcatgctatcattaaaaataggcctccaagcctaccagccctcaaatctacaccaaatgagcaaagacttcactttgataaaaaaaagaaatttccagttttgaagcattcattagtcctcccatcaaggctttctacgatgtttccagaaaacattttggtctaaaggaacaaagatgtattaaaatgagccattcctcaagatctggagagatccacggtcaagttgacagctttctgtaatttcttaaaacagcccccataaatgttgcttcactgacatcatgaattgttcatgagagatttttgcccgagttaattagttgtctgttaaataacttcagagctatagttttttaggcttttacaacagggaaagaaaatagaagttcaactgatagggccccgaacacatgtgatggccctccttttcagggtttctccccaccttccagtctcagctggtggttccagtggttggttttcctattatgctgccgtttgtgcttatgctcatcatcatttccataatgacattacaaaaggcgtgaagccctctctgtaaatagaagtgaatcagaggactcacgtaggaagcttgataactaatgatgaaagctgtaactcctgtctaaaaccagcagtcatgcctgacccctaatcaggcagaaattcaggttacaaaggttgtttagttttactccacacaatcctgagttctgctaagcaatgttcatagataggattgtactcgtacttggtaggcttagcattgatcctgaatgtgaatggctgttatcgcccttgagtatttttatggaagactggatggtctgtatatctcacctccctctaactgtctcttaaatgctcatagggcccaccctggtcattacagaatattgttgctatggtgatcttctgaattttttgagaagaaaacgtgattcatttatttgctcaaagcaggaagatcatgccgaagtggcactttataagaaccttcttcattcaaaggagtcttcctggtaagactgatttacataaatagctgttgacaggcagttcatagggtcataagggtttgcaatcaaggctgattctttaaaaaagtgaactgaggtactttgaggtgcaaaatcagaattattaaatcatttaaatgtgattaacggtttagaaagttcaaactgtttttagagattcaaatagtcttgaacttaaatttttgttgattttttaaaatgtatctttagtgtatctgaactttagttctgtttagttgaatgaattctgtacctgtttctctcagaatggttgctgtgtgtcattctctttatactgttgagccagggtcctatataatttctgtacctgtttctcttaccgtggctcgttcttgtgtgtcattctctttatactgtacagtagggtcctatatgcgtctttagagtgagacacgctgtttatagggaacatgggaaaggctgccaagttgtcacagtgaattcctttaaaacctttaacagaatggcagagagctccaaacagctctctgcaccaaggtttctcaccatctacctctgaattatttctgtattccttgcccttttttcccttaacttaggttatcaagaggcacaactactgtagcacattttaaaaaattctgcaccttattttcatctcttttatccttgttaccattctgaatttgaatgtgtcaagagtttcaagttgctttaagaagaattggtgtagtttacaatcagaatagaattctctgccatcttttgccttttctttccaagtgtttaagatccgccatttaagattttctagatttatgcaaccctacagaatcagtcatcatgtctaatcccttatacattttatctctgcagttgtgtgatgggtttcctctttgctttttatttaccatatcccctatattttgagaaggcaagactttgtctcctgaacttaaccccaggccctgaaggagacctcggtaaatatggttaatgggcgattacctcataaagtgtttttctgtacctctggctgaagttttaaaccctagatgaagctttttattttttttcaatcctgtaaactttgagtggtgtcaagtagcagtaaaatacaatataaaccaaaccacctttggatgtttctctagcacatatgctctttatatgaataaatgaaccactttgccttatttctaaaaccttggccccacatatattttttgattttctgaaataatggcctaaatagttcaatcctatgtagtgttttttgtgctttgggatcccatatgggattggaaccaccagcactctctgaaggagattgttgtcatggtgtttctatgctaatcagaagcaggaagtactagaaatcttgaagactctccagccaaatgttacagattcaagaggtccagatggttcagaaaatcatccaaattattggtgtttatctgaaccaaacttggtttttttaaactgtcttccatcagtcgctatatgttaacgatccctgtcttcccccactaataacacatctcaggagcgctggttctttgtctctttcttgtctctttcattttatctctcttgaggctaatttagagagttagaagtgatgtgggataatggttttggttctctgtttctcattaaatccctggtgtcgagagataggacatttctaaccagagtcccctctacagttgaatacaaaaaaagggccatctaattcctagggattggacccaaatgttgaatattaaaaactcatatcttactgagcaagattttcttcatttaaacttggcagtactttctttaaataaatcagcctcttaaaaaacggagtggagagatagcctgcctttcacgtgctcccccatctcccattttatttactcgtgatttgatggatgtttcatttctcgcagcaacgatagtactaatgagtacatggacatgaaacctggagtttcttatgttgtaccaaccaaggcagacaagaggaaatctgcaagaataggtgggtacctaccaaacaataagaacaacctcattgactcagagtttctcataccaccgtggaatctaacatcattcctggtagtaaccggttcttctttacaataggctcagggtaagtgggtatttggagtcagagccttggcatcagcatcttgttgcatatatactaacatatgaatatcaaaatacatcagatacatataaaaaatatgagacttttgtgttcatccaccattcttcttccttaaagattttgtaacttagcccaggtttgggaatattagctttgtgattccgcaccttcctgtccttaacactggggagaggatttgcctgcaagttcacatcagttccctgattaccagcccttggtgctgttgtcactgtcatttactccccttgttttaaagattttaattgctaagaaaatccttcttctcctaacaggttcatacatagaaagagacgtgactccggctatcatggaagatgatgagctggccctggacctggaggacttgctgagcttttcttaccaggtggcaaagggcatggcgttccttgcctcaaagaatgtaagtgggggtgattctcagaagggtcctgtccctgcccccaccgcccccaaaggggtatttagagccatacttaggatgcagagtgtcgcttgaagtgtggtaaccaaaagcagaagaaatatagtttcttcatgttccaactgctgtctctttgaaattcctgttctcataagttttaaagtgcaagcctgtctaaatgagctttctatgaatatattttttatatgcaatgaattcatttagaatttggcttttaggatgtagctgctcttagaaaataaagagatcgttattttatcagccaaaggaaagggtatctcgtagttgcagtgcttgatgaagcatatacttgagtctttttgaagttagacttcaaatattgcatgtatggtttaccaagtgctggggaagtaaggaatcgagagagtaataaacatttgatcagaaggttgagggtaggaagagaatgaaggaaccaaaacaagaaacatgaagggtgagaggaatttcttaggaaaccaggctaacagaataggatgaggttacagatcctacccttaagtgtcattggtgacatttccaaacaattaccaaactaaaagaggatataggatggctgaaataaagagcctcttccctttgtcctttggaggggtcaaattcaagttgtagacattttagaaattctttttaaaaggacatattcaaagagaaacatgtaaaattaaagcagtcctaagggtgggggggaagcatttattcaagttggttttgaaagcaattatagtaattaaagtcctaacaatgtaaaacacaaatttgaacatcattcaaagcataatctagatatttatttttggtgcaccaaatagtttaaatgtaaagcaaaactattggctctatataacataagcagcattctagctttaaatatagctttcactctttaaaaagtttaaaataaatttaaatggttttctttgtctcctactcttctaatagtgtattcatagagacttggcagccagaaatatcctccttactcatggtcgaatcacaaagatttgtgattttggtctagccagagacatcaagaatgattctaattatgtggtcaaaggaaacgtgagtacccactctctcttgacagtccagtaaaagatttttgtttcaattttttaaaaatattgtctttttatgatttttataatgcaaatcctgcctttgcaatatcatgcattttagcagtcaaattaaatatactttagcaaaattccaataataggattcctaattctaattgtgtaattatggggcatgtgaaggaaacagaaatagctttaattttcattataacttgagaatagcaatgaactcgattttgttcaagtgaaacaaatgtggacctgaaggtcacagcaggagaattttattttgagattgacaggctatgtgaaaaagattaaaatctaagataatgttcagaattaggtatatagaatcttggatcttataatcaagagagcttattaaacacattcttaaggaataattggcttatggaacatagtgattttatttcaaagtgctttatttcattgccaattttcattgtatcaacagggcaaccccttggcattagaatgcagcgtcttcacattttaaaagttggggaaactaaaagcacagtgtattttagtgatatttgtctgagatgacacggatcagtagaggctgaaaccagagcctatgattcccagagcaatatcccattagtatgggaagccagtagtcctgaacatatatttttctccatctattttcccaggctcatatctccagtccagagctattcctagaggtagctatttgtgtgcctacacataatgtaatatttccttctccatcactaaggcgtctctgtgtgtgggctgtactagacttggtttttgtagaaatgttgctgggtttactttctgatgacagtatgtgtttctataataataactcgctaaggctaggagtgttaataacaccaagtccccaccatcctggtgcactgctggaaggaagaatgaaaggtggttctctatccaggcctttgaatattgacaaaaggctaatggattccgggcccagtcttgctgagttcgaacctggttctgtcgtttagtgagtgtgtcatatttggtaaagatgaccccagcccttcggatttcttttattaatagatctcaagttaagagcccctataagaactttagcacaaaatctgggaggggatactagaaagcattttatttttttcctactgactaaaataactttaagaccagaaaaaaattgtcttcccagttttgggtcctaaatggattatgggaagggttgatttagctttctgtggtaaattaagatccaagaatccagaaatgtctctaagagaaatagtcacagaaagtttggctcgatgttagcggaaggagttcaggatgtgaagttcaactgttgaatttaaactctgcatctgccactcaccaccttggaatagtcatagtcagcataagccactgctgtctttatcaagtggttggttgtacagggcaattttccacatcctcgtgaatcagccataccaaactaagcaccggcacccacattatctcatttaacccacaagacaactcatggaatttgaggtttgattttttgctttacagaaaaatatcctgaggcttctattacagatgtatgtgatgttcccagtgtgttagtaagggataattgtggttgtatttgacagaacacccaaaaggaaagtaaaataagtgtaggagttgcaggccaggcctggtatggaggttctgtaccagggaacaagttcctcaacctttccattttataccatccctggtgtggcccttagcttcatggtctaagatggcctcaagaaagccagccaacatatccagaaggcaagacagtggaggaggagacaagaaggaaaaggccacaggacacatgccaacttcatattaagaaagttttccaaaagctgtcatacaatacttagtggccaaaaccaagccgcatggctgcacacagctatgaaggagctgggcaatgtagtccttaccctgggaggccacatttctattaagagataagggtaactaaccttctttggtaactaacctctgtgttacacgaggccagtggtggagcccaggttagaacccaagtatctgtctctgacaactatgctcctaaccaccaggctgtactcagtgacccccatcttgaaaatgaagatagtattgggcttccctggtggctcagacagtaaagaatctgcctgcagtacaggagaccaaggttcgatccctgggttgggagcatcccctggagaaggaaatggcaccctgactccagaagatagtatacagttgaccatcgcacaaggcagaggtgaatctcagtataaatgcaagccagaactccatatccatggttcctccacgtccttggattcgaccaagcatggatcgtgtagcatttattattgaaaaatattcttgtataaatggacccatgcagttcagaccctcattgttcaggggtcagctgtactcgtgatccacatatttcagaggtagtcagaaaaaaagtaaaaagtcataattcacaagagttccctgctggtcccctggttaggattctgggcttttactgacaaggcctgggttcagtccctggtcagggcactgaggtcctgcccactgcttggcacgcataccccactccaccccacaaaagaaaaaccatcccaaactaaaaaaaaaaccacacataacgtaattctcagaggcaatcagggtcctctgaggtcatatgggtagaaggtctttgtgagatgcccatcaagttctcaccccacctctctataggaatattttctattcagttttttattttttattttttgatttgttaatcacaatgattaatatcgttggatcttccatgcttcatatcgttggatcttccatgcttccattgcaggctcgactccctgtgaagtggatggcaccggagagtattttcaactgtgtgtacacgtttgaaagtgatgtctggtcctatgggatttttctgtgggagctgttctctttaggtaaagtgagccttgccaaaggcaccttaatcacactcagagctaccagtgctctccttgctgattgtcatgctgatttgcaaactgtttgtgcctcaggaagcagcccctaccctggaatgccggtcgattctaagttctacaagatgatcaaggaaggtttccgaatgctcagccccgagcatgcacctgcggaaatgtaagggcccagatgtccttccttcagataacgtttcctcttttgttttcctttttaaaagacagaaacccgtatgttgagggttttcactaagcatagcttgaaatgtcatttggttccttgtaatgacatcctgggcaaatgttatttctgtcgctgagtttcataaaactcactaccaaataaagttttggcagagtctcagtacacacagttttattttataccaatgtcattcagtatgtccagttgtgtaaccctggaattatgtttgaaattgttgaatgggatatacctgcagatcagttaagggcattgaggaatgataattggccctggtcttgcaggtatgacatcatgaagacctgctgggatgctgatcccttgaaaaggccaacatttaagcagattgtgcagctgattgagaagcagatctcagagagcaccaatcatgtgagtatactctagccaggcataggacctccattctcttggttccaaagcatgtcctccttctcaggttccgggggtgaggactaagctacccaccctttctctccttcgcttacgctataaattgagtaggaaagtgaagcaatggaaacaagttctttttgcctagccccctactctgagccaaaggatatgagatgaagaggggaaagagtagagggcttgacgctcagaagtgtgggcatggaagtttccataaggatttgccacttttccttcttcaccccaagtgttggtcatgggggtttgcatcttctctgtctcacatgtcaggccattcagcctttggagggttggggtaaggcacgtagaaaagacagcttattccctgcagtaaaataaaccttctgctcaagtaagtataaccacaatatggcagattgctttcatggccacaaaccgtagagaatgaagagttgcttgaagttgagggatccctcccagtgatttgagaagcagggagttcaaaactcaaattcatgatttcttttgcttttaaggaggaatgagtgattcttcaactcagattttttttaagctgctttttcttctggattgtgcttggatctatcttttcttaagattataccattgatactttcaggttgaagctcgcttttctgggtgtcaaagcacatttcaaattagacagcatttcacacccaagtgcctggttctcaatggaagaaccaccaatttcttagtgaatgacatcagctattagatgggaattggctacagaaatttatgtaccttttaaaaaaaattaggtcgttctcattcctagatgcatcccagcagaaaagcacattctggactatcacttcttatgtaatcaaaccatgggaaaatgagggataaaacagcttatccttggtcagtgtgatttggttcttggctgtaaggtcttgtcagcctcctggctgtaagaatcttcctaagttatttgcagttcccaagctgcacatgtgccctattgttctttgtggggactggcgtattgactgtggatttattttcctcagatttattccaacttagcaaactgcagcccccaccgggagaaccccgcggtggaccattctgtgcgcatcaactctgtgggcagcagtgcctcctccacgcagcctctgcttgtccacgaagatgtctgaagcagagtctgcatccgggggtctcctgacaaccccaacccccctctcttttggtttttacaatggttcctttgttttccttccactcgaatcctactcaagggtagtggacaccctgtctttatgagcaccctttagtggccgatgatttttgtcatcagctaccatcgagctgcctatgttcctaatagcacactagcccttgctaacgagaaaacttcagacttggagaaagggtgggtgggatggactagacacactgagtctttcccaaggtttctccaatttctatctgaaaaatgtagtgatagttttgagtacatagcagtagtcaccttcattcctcataatcacccatgatggtatgatgatgcagcaagactagaagctgaaaccttatcctttgatgtggaaaatagaatgttattcaaaggccagaagcctatgaatatctgggctcaagaaatctagtatttcatgctgggagtaagacataggcc

SEQ ID NO: 215 - DNA, 92250 bp, Hippotragus leucophaeus
  source 1..92250: mol_type = genomic DNA
ggcagatcagagactccgcgcccggggcgcagcgcgagtggcggctgcagcgtgttcaccttcgtcctaggcgcccccgcgccccagtggtctcccagtcttgcgcgcaccagccccccagcgctggaacgcgcttcgcttgatctgtccaacttctagcgctccagccgccctccagggtctgcccgcctgcccccctgccccctgccgcagcccagtcttgcttccccggggctccggaagggaaggaggcgtgtccggagtaggcgggcgggagccgtataaaagtgctggcggcgcgccggcccgggcttcgctcaccgcctcgcgccgggacagggatcgccgcgccaagcactggcagtggagcgggcgttgcgctcgggctcaatgcgtggactatccgcagccgctgctcatgcagtatgctggagctccagaacagctaaacggagttgccacaccgctgcttgggctggatcacagcgctgcctttccttatgaagaagacacaagtaagtagggcgcgccggggagctcgccagctctccaagaaaaaccgtgcccggaggccggcgcgttccggccccaactgccccggcgtgcggggctgtgcctgcccgacgagcctggagggtgtgggggaggcaggagaggcgcgcgagccccagccgcccggcttgggtgagcctggagaggagtgggagggatgagcgagtgtcaagtttggagccgtagcccgtaagttgggaactgtcagtcgggagccgcaattccggtaagacagaaggatctgttctttggccggagagttgaagttattccagaaaggcacgtccttgcacggaagacattttcccgtggatttcgggaagattacacaacagttccccacgcgccacgctcggtcactcgcgtactcagatttttgtgtggctccggtgtgggtgctgggctcgtgcggactctggtccgaatcaaccccgaggtccttattcgccgcgctcagctggcggagaacctgccccaccagccgggggaaacttggctcccgcggcgtctgccaggtttgcggctctaggcgagctctagatagggtaatacctccacattgcacccactttcttccattacagaagagaaaaagttgtataagtgtgcgcgcgtgcgtgttttaatgggcacctctggtggtagttatggaggtaattcccggtgctgcaaaatttgcattatgcacaagaagcacagagggtagagcaccgtctaggggtacaattagttgttgttgttgttgttgtttttttccttttctttccttgcagcagatatctctggcttgtccttgaaaaggggccggcgtggcactcccatccacagttcttttcgccagctctcacctcttcttacttctcccattaggaatttttctgttatctgctgcgggttaggtaaggctgccctctcaccccccagaggttctgttggagattgcaattcttgacatgtgtcgagggggtggaagtggcgggtgaaaagattgtatacgtcttcagttgagaatcttgaaaatgctttatgtaatgacacactaagtgtcacattttcaataaacgtctagatctgggaagggtaccaacgcattcagaagcaagtagaaagacccgagcgcattacactgtgtggaaaagagcaggggtttgggacttggcctggcagaaaggtttgtgtagtctctagggcagctgcccaaggaggaggaaaggagtgcagcgcaggtttctttcttgcaagcaggttagtttataggcagagcacctgggatcaccgcagcgggctgttgaaatgcaaatatggaagactggcaacagaagttttaaagtaattgcttgacttatacatgctttctgctgtgtgaaattaataagcatgggcggggaaccaattctttgttacagtagcatctgctcacatgaatggcagtagtgagatctgggtggagaaccccgctaccttccggttcaggaaaagagcctaaaccttcctatttaaacaagatctctggagacagatcaggttaatgaccaacaatccaaaggtggggggtgggggggtggggtataggacggtactatcaagtaaacttagattcggtaggattgatgatccttgcacccttgcttgctttgcaaaacaaacggtgagctctgtaatctcctttctcactttgattaaatggctgtgtaaatcggattacatggaataattccattgaaaactagaaagaggtcgaactatcctgaaactccttggtggcagtgaatcagtactgctgaccagggacgttggagacaggcaagtattttagaaatgtgacctgctcaggctgagtaaaagtgcaagccctttgggggaacttgctgatgctgaagggctggaggcaaaggagggcagtgcccttggtgaatgaaggcattcattgcctgggatctaatgaccttcaaggtttcctttaaggatacttctagcaattccacattcttgccactgaagaaggagaccctggaaataacatgaaatcaatgaagtaatcagtggaaatgggggagggtgcataggtcctcattcatattgttagattttctaatccaaaagttacaaagaaattttctagtgcaactctgtatgaagggaaagtagcgtaaggtaatctggcattaagagatgagatcaattgttccagtgaatctaatgttatacttgaaagaatggaatagctattaatattcagtagttgaaatagtcatttataaagatggaatcaatttcaagttctgtaataaagcaaacagttgtgtacccttccattacccaggatataaaatgagaaattaatatacttgaattatgcagctctccaagaatcacagggataccaggctataagacacattctagccttatagtcaagctaaataaatgtggaaattccaccaacaaccacttggggtgtgaaaaaacgattctttcatttatttagcacatttgatggaccagcagatgggcaataattacacggcaggagtcgtgaggagcaatttgaacggttaagttttaatcacatgtctacagaaatgaaagtggtttgcatttttcagatttctgagtgttttatccttattgtgtggttttacggtttctgaagagaattgtgtctctggcttagaacatctatattcagcatataataacaattggacatcttaatttgcaagaccaattagaaaaatgctattagtttaacagggctgatgccatgtttattgatgttgtacttacattttagttttgagatggtttgtgagttttcacaactgctgttgggtttagaaatatgaagataggaaaatttcatctggcaaatggtgtagagaagaccactttaggcacgcattagttctcagaagcaaatagaatgattattagcttttgtttttccaaagaagataaccccctctcctttttttttgtctgtgtgaagtttgtcttctgggtgatgatgcaagtttataaaaaattttaacatttatgaaaagagcattttttaatcttgtccttagaaatcactccatttggaatgtgtgctttgaacaatcctaatttatgtagcttttaattgatacattctgccaaaactttgaaacacaactgctaaatcgattacgtttaacataaaacaaggaaaataaccatatggaaatctgaagggctgagccaaaccaattaaaattgccaaattttatttatatctaactgctgatttggagagagcaaattgtgagtcacatttattctataatgataggtggttgaaatctttccatcaccatcaataatgttaaaaagaataaattcttccccaagtagctagtctgaatatgagaggttcttgcgtggtctggcaagccccacttcatgagcccttccccatccacgtccagggagcacctaaaaatactgaagagatcttaaactttagctcttcagaacgaattctaattcctctcttaccactggtgagaaaaatgactttaggcacgtggtttaatgtcttgggatttccatttgtaatctgtacaatgattatcaaatagttataaagatttgtaaggattaaatgagattttatgtatcccagcacagtggcttgctgtggttacagcctaaatttattatccctagaagaaagttgcctctcggctctcttaaaagccagagataaaactagcttttgcaggtaaatgatgcttaaccatcaaagcatagagaccaagttttcataatctggatctgtggattcaactttataggctgatatgtgtttgtactcatcaaatcaagaatgtgtgaaaagaaaggctatccatggcatgggagatactaaattctttaaatttttttctttaaaagtgaaaatgagagagtgaaaatagtaaaaggaaatatcactatctctgattcactttcatatttcagcattctcgctttctgagcccctctaatctgaaatctgaggatttatgttatttctttttagaagggactgggtcagcttcttgtccttgatgttcttgaacttgcttttctgagtgaggacaaggattcacgtctgcaagtttctttattgtctttaccaggcaacatgcagtgacatttttttttccccattacgcaattttgggagagtttttttttttccttgattaccttaacgttcccttttgtaaattagggtaaggcacttggatataaatctgtcaggaatgatcttttatctttgttttctagtacatgaatcatgagcagctgcaggagactgtcttttcagtgttagtcacctgtgtagttggaacaatttagaaaacaaattgaagaaacaccaggatgcttttctgatatatgctgctttcaggattattttgtttggactttgtctcaaagaaaccattgactgtagccttactgatttatagatgcagtgagatgcttttgccttttcacttaattatgggcatgctaaaactgtttactgggggtgggagagaactgtcattatctatctctacctatttccttctgtccagaaaaatggaggtgatggggggaagggtgattttcttataattaggcctcagggacctttttctaaaatcacaatgtgtgtcaggaaggacaggaagactgtcctttatataactctctttgtcttttgactacattttcctatttttctaggttgctgcattgacttggttattagggggtggagttcttttttagcacagatactatgttatatgactttgggaaggtatttgaatctctctggacctcagtttcctctactgtcaaatgaaaaagtaggactaggtgatttctcagtgtcttacacttttaaaattctctaaggttctagtaaaatagatatttgaaccagttggcgtttaagcttccattggttctgaggttcgtgtagtcattgctttggtgtgagtagaaatcataaccattgtctattatgtggttatggagtataaccatataacttatacatatggaaaataaatccagtggggcaaaatgaaggagatttcactttaaactgttctacttttagccttttcagctactacttgatactttttctataaagaatggtgtttacacttcctattttagcagtatccctcactaaaggggatctttcctttctctcttccaatctttaaattctcttaagtgaagaagaatcttaaggcaaagtcagacagccagggaggtcctcttacataactaatgtatgcctgcctccccatattagcttgtcatttctgcccctgcggtctctaatatctgtgtgcctggagtagaaatgtatagaaagagctttcgtggagggtatcagaggtgtgggtcctccacttggctcaggctccagggccagtcactgagcctctgtagtcttgggcgagtctcagacaagtcttgggcaagtcactgagtcttagtcttaatcttagtcttagtcgtatcgtgccctagagttaatcctgagaagagagtgaagaggaggggtctgcagctggagacgcagaggctgagaaaggagggagcagctcttctgcctccgggagagactgttcctgaggatggttccttgccgtctgcgtctcgccatggcctgggtttttgcagggctaggaccgctctgaacacctcttactcaccactcttccttagcttctcttgccgactgacaggactggaacctgggactagctggtagccagcagctggatttccttggcagccagaagccactttgctcatgactgacatgagactattcaaagatcaactggaccccccctcttccaggcaaaagactacaaactctacagaaaattagagctgtgacagtgacaacaatgtaccatttgctctcatcatcagcaaaatctggcgagcttcctactaaaaccatgttcagaattgaggcagtgatccagatacttgaacggcagcagtggctttcagttatctggatgtaagaattcagcacttgactttgcaggtgtaagctgttgccttggggcttggagtgcagctgattagaatgtagtctctaaggggggcagttagggtgccttttctgtgttcctggcacacagacagcagctcagaaatctgacagttgccttgcaagtaatgcctttgctctccagggtgaccatgcaaaagggcgtacaagacgagagcaagagcaaagctcagtcactgctcatttgcaaaagcaagccccagcctccttcacctttgcagaaagggtgtccccgctgtctaatgtaccctgactgtacactatgccaccactggagactgggaaagaaagagcgttacctggagggagccgttgtttgtcttacatacacatactctgttgccctttcaggagcagaagttcatcttttgtgtaaaagccctgtgagtgcttagcacttttgcctctttgtcaccttgacatgaaatctctgaagccaaggacctttccttttatgtgtctttaccaaaagtccaggactgaattacatctggtaattggcctgtttcttctaaatgccagtgtttgagtggtagtaaaccaagttgcctctaaaaattacggcttaatagtggtaatctattgtcacagactctgttttgctgagttttcgactgtttactcggggtccctttctgaagccttcctagatgccttatgaaaacacgcatctcttgatttccaagaagagtgtagcagagaaagtaggttgtgttacaaaggccttgcccctctcctggaatgtgttgtccttataagaaagaaaagaaagatagtgctaagtcgtgtccaactctttcgatcccatgaactgttgcttgccattctcctctgtctatggcatcctctaggcaagaatattggagtggggggacttatagatggctgttaaaattgacttcactgcagaactttagaagggaggagggaggaagggtagagatgtttcatataagatggtttctaatgtgatccagaaaagccaaggattgcaaaacaaaccctagcagttgcacatcagtatttacggttctgtgtaaacctacagtttaacacttctgaaatagtcactgcattagggatttccatttttgatgatcgacttaaacctctgtgattgctttagcttggacctctggcaattttagaaagctgctaccttcagccagccctacccagagatctctgatgtgttctgttaggcagagaatgaactcaggtcattctactgcttgttagatatattatcacacaacaggaactggctctgtgctttctgcctccagatggtccaaagtgggtgctaaaatgctggaatagtaaagaagtcagaaaacattcatgaaaaatccaaaagaagttattagcataatgtttttaatactggatgaaattaattctatgtagaaaagcatagaagtacaaagtaggatttatataatccttccatttttatgcaacaaattgtaacaatattgttttttctaattcttaacccctgcccaggaaagtattttaaaactttaggacacatgtgtttataatgtactttagccataatggtactctatgtctgaacagtactaggaaatagtgaactataaaaaatagtcccccatttgaaactcggatcttttatattcttaaacaattccatagacttctaacccccaagttgatttgaccatttattgtttgcatttctgtataaatgtcacacataaatgatttggcttgaaggaatgatatttattacagtttgtgtcaagcattcgacatttaaatgtgtagccattttaaatagctttcatgattattttgtaaaatcagatcaccctgataataagattatgccaaaatagcacttagtagaaaacagttccaagatgaatgaattcaaagaccttttcttcttaagtcccatttcacagatgaggaaaccaagataaagtcttttccttgttaactcaaagagttttctggtcatgatctacaccccgagattcagttggcactaccgcagtccattagtgcagcttattcagaacctcaaacatacacattctgctcataagaacattgagtcaaaaacaaatgcagtcagatattaaaaacagctgcctgtaatagaatttggcaacaaaaattttgtggagtgattcacactagaggctcagtgagaataaattgaatgttgtggaatgaataaatgcctgatatcaggttgttaagggctaataacctgttttagaagcctttttctttcttttttttttcaacagtaggcaaattttaactactgtcctggctatgtcatacacagaactgtctggttaatgattggaaaggctactttggtccccatttacagcattaattttcagtgaatatgcactatttactaagcaaaactggcaggcatgtgagaatacgaaaaacactggactgaagcaaacacagtagtggtcctgccacttactagcagtgtgctcttcagtaagtatttctctctgagctttactttcccagtctctaaaatgggtgcagaaataactacctgtgggtagtattgatgttgtgattaagtgagataggctgtgtaagggcacaggggcttgctcctagtaaataaccagtcccttcttagcaagaagagtgaatcactgaacctttccacaaatccacatgcattatttgcatttcctgactttgggtatagggcttgcaggaataagtgaattaaaataatagagcttgggatagttggggaatttgggattgataatgtacacactgttagtttttaaatggataaccaacaaggacctcctgtgtagcacagggaactcaacttacttaatattatgtaacaacctaaatgggaaaagaactgaaaaagaatagatacacgtgtttgtataactgaatcactttgtacacctgaaactaatacaacattgttaatcaactattactccaacagaaaagttaaaaaaaaaaaaaagagctttataccttaactaccttctttatacacaatctaccttctttagcactcttagcagattaaatggaatttccctccaactttatatcctctacctcatttttccctttgctacgacagtaacaggcatacaaaatgggccaaaaaacaagctgcttaacaaaaggaagaataaggaaataaaaagactagctaataagttaatacccattgattactcaccatacctgaggcaccaggccaccaactgcacaggaatttctcatttgattctagccaaaaaaaaaaaaaaatcttacgaagcagatatcattattgatatcatgttttcaacaaataaggaaattaaagttcagagagattaagaacacttgcccaagattataagtggggcaaaatgcacataagtagaagagtttggatttgaagccaagcctgtttaattctacaaactagattccactgaaccacgtcaatggaatgcacctatgtttaaatatacatataatctgtaaggcttgagacttaaaaaaaaaatgtgtgtgtgaagatgatggttttttaatcttataaggggaaggctgagcaggcaaagcagagctcctggggtgagtgaagcattgcttctgactcagctctcaggaccacccaggagtgtaaatggcagtgaagagcagtaacactcccacagtctgggagcccagcgtggtcctcagtctccctagccatcagatgcttgcctccgctgacccattgtgagggaggccccttgttaactggaaaaatgccattttattttatggaattaagaatcactgccaagttcttggtgtctgtcaagtagaatggtacttttgttggcagaggagaaggttgttaaatatttgaaaattgttgcaaaataacttcttcggagaagaaagctgtttcaaggattaccttaatcaatttgctctgactgtcttttcatgctgtttctgaagacaattttcagtgactgcgatcatttttggaaaactactgaataatgtctttttgctaaagctaccagctgttaaagttgtgacctttgctttgtaattccctatcagtccaactgcatggatagtaaaaattcattttctgcattgatgttgtgatttttttgcaacaaatgactgttggaccatccttggtggcagcatcactttgtaacttaccagtttagtggaaatgaaagtgttctttaaaagatcctggaatcattcgaacataggtgaaagaaacagcagaacagaggtgtgatgagctaaacagaactaaacagacagcagttagatggcctgctttggttggctgatcctctgagccttggtttccccatctgccaaaagggagagcagtacatttctcaaaggtggttgtgaaaattatgagaaataatccataaaaagtccttagtccagtgtcagcacctagggaatcctaagtagatattcacagtaatcattagcattaagcaaatggtaaacttacgtttatactgaacagatagcttccctggtggctcagtgaagaatctgcctgccaatgcaggaagtgtatgttcgatccctgggtcaggaagatcccctggagaagggaatggcaacccactccagtattcttgcctgaagaattcattgacagaggagcctggcgggctacagtccatggagtagcaaagaattggacatgacttagtgactaaaccaccagcacagccaagcttatcgatagcaatgaagccttatgttttaaagtgactttcactgcacaatctccattgtcagaatgaaacagaaagttgaagcaatttatccaaatacttcaggcctggaattcactttagtcctaaataattgttttcattccctactctaaccaaaaaactgaaaaagagctaaatgtgtatacttataatcacaagatagtttacctagagcaaagttacttctttctgtcgtgtgctcaagatcacagtgctaatacgtggcggagctggcctaggaatcaggtggtctggaaccagagcctgcattcctcagccctgtgctctacctggaattgggggtacagaccatgagtccttcccctgaattggtgagtgatctcctttccctctctgggaggaggagtcgttttctgcatcaacagaaatatagccacttgttgagggagaaaggaaagagtatggcttttgtgtcaaaagcacctaggttttacctctagctctttattctagctttcaaagggatcttaggcaaattagttaacttggcttagccttctcttaaactgaatttcctctcttgtaatgtggaataatacttcgcagctttttaacctaaaaatagtgttgtatatctgctttgtgattgtcactcacagaattgtactattataaaaaagtgcgtttcagactgaacacatgttttccttctatactattaagcactaaattgtgactatgtaagtgtttgattcattggcctcctcagacactcaaaggagcatggactttggagttagaatgaggcttaagtccttaatcttgttattcaccaagacccactttctttctctgggcttcagtgttcctatctgtataatggggtagtaagggtaataaaatatagttggaagaatacaaagattacatgagataatgtatggcaactggctgacccagactgatgttcagtgagtggtatctctaatctttagggactggaagactccagccaacagatccgtatggatccgtctgttctgtctcttgctccactcgtgtaatagctacaattatttaaacctgttgtcactgaaaagcagaaaagcaaagaaagattatgggaaatgggcttgtgtagccgtgaaccgagactagtaggggtctggatgtgggtcagcctcctgctttgaaaccaaggatgctgatgcttgtcttgactgcatcaccagttgtgtgagacagagataattaatagaccagtgctcctcacactgtgttgtttcattcagaggcctacagtcatgctattattctaagccctgactaatgaataagtccagctttctaaataatgaaaattttgagtttattaatgtctcccaaaatgagcctcacactgcttcatatagtatgtattaatagttttggagacgcatagatatggagtcatctcttcaaattggaataactttgagtcgcttaattcttttaacattctgacttcctcatttgtaagatgacatttatagtaatgtttaactcatcaggtggttttgaggattaaaggagccaatacatgaggaggactgttccataccagataaccaggaaacctaggtaaatgctagcaaatttcaagcaaaattcatttttgcgttcagttggttgctttttttttttttttttggttttgtctgtatgcattgaatttgcatgggtgtaggatcaacagtttggggacatttgcattataaattcaggttttattttcttgtgggtgatggtgttttagagtttaagggcttgattgtcaaggttaatcttcaagtaagtgttgtatcaatcaagaccagacgcaagttacttttatcagtccattatttcaggtaaacaagcattcccttcttggacagaacattaaactgttatgttccttttgatggagtgctgacttgcggaagacagaaaacggctcctatttcctgacattgcataatctgaagactgtttctagaggtttcttgattgaatctttgactctcatgccttcaacaattaagttatcaatccaaagaagcgtgaaataactttgggctcaattcacagtaggctttaacataacaacttgagtcaaaactcaagtgaaactcaaaagtgaaaagatctcttttagatgttgaaaaagggggaaaaaaaaaaggtatgtccattctttgaaggcccaaaggagaatggggctgaatcattgatatgtgtgttataagttgtttaagaggagagttagattataaaggggctttttgcatctttccttgaaaattgtgtcctggcacatgaggggaatacagccgagtcaaaacaagcacgtgactgactgcacaagaatctgcgtcctaaattcaactctatggtgttgatatagagtttgtccctctgatggcatcgattttgtaactcaacaaaatgaagagtgaattctgtaatgttaaagattctctgtaatgtacacagtccagattattaaagaagtctgatcatgtggctgccctggttaaaatcctccactgactttatattacctgcaggataaagtccaaaccctcaacacactgtacaggattctctgcgatttggctgttgcttatctccactgctcccttagtggtagatttcgtgccagtgtcacctaaccaacgtgcagtgaaacagtgatatactccacgctgcacttggtcttgaaagcccgaatagcccctctttatcctccaactgatctacctgaaatggttcctcttagaagccctccctgaagtctgttgcccttcttccctgcctccactccccctgtattgagtgatcttaccctatgcttctatagcattaaatatatatgtatatataaaacaatataacaaaattttcttatttgcctgtctacctgcctaaattggttcatgttgatatccttggctagtggtacaccaccaaaatcttattaaggtttttggaaccaaactatgagtgaatgaatcacatcagttgtttcttttactgaatctttgactatagcattctaagcataggtcagactgcttatcagtttaatgcctgctgacctcggttgatgcatggggtggtaccatggagggcgatttggaaggtaggaggaacctcaatcatgcattgatgtcatacctaggaaatgcatataaccatgcatgcagtaccacttggcacaaacatatgttgtttaaacacacttctgtttggagagagaagtgggccacttggggttgtagaagaaggtagaaactgtggattaaaaaaggagttgggtgggtcaagttactggccatctttaaggaaataacacactaggttgaatagcaggttgagatggtgctggctaattcaagatttatagggtctaagagccagaagagaaggaaatggcaacccactccagtgttcttgcctggagaattccagggatagaggagcctagtgggctgccgtctatggggtcgcacagagtcggacacgactgaagcgacttagcagcagtagcagcaagagccagaaaggattttagtagatgatactgctgctgataagggtgaagaaaatgccgattctgattctcatttggtgtaccaggtcctgacccaagtgtgtcacatacttttatgtgcactagtttctccacttatgagtctggtcatgtgattccttccatttacagaataggaataggtagggggtataagttgctcagcatcttacaactagttagtcttaaaaccagtctgtttggtgttagtattgctgacattttctctttttgcttaggtaagatgtttttcttgatacatgataatgaataagactgtcgtaaatagaataaatgaaattctttccagcttcagttcagttcagttcagtcactcagtcgtgtctgactctttgcgatcccatgaatcgcagcacgccaggcctccctgtccatcaccaactctcggagttcactcaaactcacgtccatcgagtcggtgatgccatccagccatctcatcctctgtcgtccccttctcctcctgcccccaatccctcccagcatcagagtctttttccaatgagtcaactcttcgcatgaggtggccaaagtactggagtttcagctttagcatcattccctccaaagaaatcccagggctgatctccttcagaatggactggttggatctccttgcagtccaagggactctcaagagtcttgcttacccacattcaagaagcttcctttcatattttccttccacagtttgtgttggttaatggttagccagtgcaacagacaagggaaggatattgtaaaggattatacactaatgtgtataatctctatcaagaaagtgatgaaagaaatatgagacaatagacagtatgagaactttagatggttcaacctaagtgatatttatggatttaagattgatgtggttaaagaatttagcaaaaatgacgtttcagtactcaggatcaaagatgtatttaagtgtgcaggaagaaagttggagaaggttttaacatgaagtgacattttcaaattttatctgtgattagaagccaccatcttagtgacccaaggcaatgataccacttataatacagagttcttaaagacaaaactattttgatgccaagttttcaaaagttctgaagttgttaaagttatgcaaccttatagcgtgccctaattttactttttttttttcctaatcaggtaagctgcttggtttggggtgtagaactgaaaagttagcatttctgaaacctgtaaaaactttttaaattttggattatactacattataaggagcaaaatctacctcctgtctccatttacaaacaaaagctccaaaaagtaccatacacgagaaggggagatgacacacaaaaattaaacaaagttgacatgcagatttggcacttgaatcatacggcagctgaagcatatctttgaaatttcatttagttggctacacagccctatcttcatttcctgaggaattggattcccgttcttccctgtctagtgagagaatctcttagctctccaagcactctacatgtttatatgtatccctccatccacttttgattcctcagcaaaacagctgctttgaaaaaagcccaaagaacagtcttacaatggatactcactcatcttctttcctgacccaaggagaaattcctttctttcttttttttttttttcctctaggatttttttagagttaaggcttgcgggtttaaagtacattttccatattcttcttttgtcttattatacaaggaaacttaattgatcaatattatggagaatgctaagcacaactctatggatatcttggtgaaaaatcgcagtaaaagagcttgctgtgtagtcatgcttattagcgtgaaaatgtctattttggaggggagtggtggtgagggcagtgccatctgagtccacgcctgtgtagtctggcatgcaacttttagtcaaactaggaatgggtctgatgacataaaaaaagtcatttagttctgtgaggtttctttttttttggctgcttcagtagggatgacagatagagtcaaccagtgctttgggaaaagataagattagcatttaaaagcttaacgtatgtcatcacttctgaacgtgcctgctccctagtgaaatcatattccctgcatgtgtttcccagtgcagagccaccatgaataattttttatgaatgactgctttagaaattttgatggattgcagctccctggggaaacagggagaaatttatagatgcatcttatactgaattctaaataagagtgtataattgtacttacttccactgaacttactataggaaagtgtctgcattccaggtcttttttttttttttttcctaatgcctttgttgagtcaataaaagaaagttactgcacaggatactcatctagttcctttagaaagggaattgggattttataggcaggtcagtactttgggttattacctcattttggccaaatctgccagtaaaaacagtttatttagcatttagcagagcactgtgctagaggctagagctacagtagtgaagaaaacacatcattcctgcttttcatggggcttatagggtagccttggttttatatccttattttccattttcatggggcttgagaagtatttaaaggtacaaagaaaatggtttaaaattcaaactgaaaggcatttagctgatgttgcattttggataattaagaaaatgttgcaacattcatatgtgtcatcattagtctttggcagttactggattcggaaggaagacagcggtttatgtccaatggatgagcaacactgtttcatttatccttcattcattgattaattttatccttcattcattatggatttattgtatacatgttaatgagaagctcctctgtatttagcactgctctactcaccctgaacaaaacagcgaaagaaagtacctgccttatggggctcaaactcaagagcaggagacaggtaacaagcatgctaagtcacttcagtcgtgtccaactttgtgtcaccccatgaactgtagcccgccaggctcctttgtccatggggattccccaggcaagagtactggggtgcgttgccatttccttctccagggggtaacaagcctgcctggtgggtaatgtcagtttcatggtgaataaggacacctcctgctaaggagtgaatcacacactatcctggcttcacctgcacctcatttcacatacctgagtttattctctatgcaaacaatttacagcgtgctcccaccagatctgtactatataaaagagaattagatggtaggagtgcttaagtagttcaaggagctgctgctgctactgctaagtcgcttcagttgtgtccgactctgtgcgaccccatagatggcagcccaccaggctccccctccctgggattctccaggcaagaacactggagtgggttgccatttccttctccaatgcatgaaagtgaaaagtgaaagtgaagtcgctcagtcgtgcttgactcttagcgaccccatggattgcagcctaccacgctcctctgtctgtgggattttccaggcaagagtactggagtggggtaccattgccctctctgagttcaagtagctagagataagactgatgaacaacaatagcagtatcctcatcctcaccccattttcccacttgtcagaaggaacagggataagaataaatgggccatcaagacagttttctcataatttttgatgaaaagtgcttcagtggaaataaaactgtgatctgagagtgctggagctgcttcaggcaggtcacctgggaaggtttttcccagaaggtgatatctgaactgaatcctgaatgatcagaaagatttgcctcattcacagcccaagagggagaaagcttataagggtggtacaacagcttagggcagaaatatatccccggtgtttaaggaccagaaaggaggcgagtggagctggagtatggtgaggggagaggcatggtgagactgagcatggagcaggacaagtctgtgttaaatggggccttggagaccttgatagggatgtgcattttatcataaatgtaatggaaaggcattctgaggttgtaagcaggtggtggtgatttgcaatgcctgaagaccacagtctcgtgagtagcaggcatggaagcaaaggaggctatttagaaggtccttggagtcttccaggcaggagtgatggagctgggcacaactggtactgctccgagatgagatggaaggaagtgagtgtttcgagacttatttggctggtagaactaacggaacttgacagagttaatgtggcactcggggaatgggaaggatcaagtttggtgctcagggttgtagcttgagccgccaggcttcaggtctggaaatgacattactggggatgcttgttcttggtgtggttgaaaagacagcactgataaccacagtagtggacatttaggagggtgagctagctgtgagggactccataccaagtgcatgtgtgactttagtcctcaaaaagcttgtgaagtgagttccattattaggtccatgttataggtgaggaaactaaagcagagaaagataactttccaaaggccatgaggcaagtctgtggcacagtagagattaaatctagagcagcctgattgtagaatcactgcttctcagccccccactctgtaactgttctctgtgcctgagtaaacacactctcttttctaaaaccgtcttggattattactgaagctgaagttgacttttgaaactctactcttcaggttaacattcacctattgcccaaacagttccgtctcactattgctccaggtagagatgaccctgtcgatgctgggagagctgatcccggatctaagctcagagatcagtttcataacctcttttaatcaccttgttgtgttgatctttaatatatgaggaaggtgggaaatgaatgggattgtgacatccactgttactatagtttttagtttaaaagtcagcagttagaaaaccaggagttatgataaaatagctacaggcataccttcttttattgtgcttcactttattgtgcttcctagatattgctttttttttttttttttttaaacaaactgaaggcttatggcatccctgcctggaccatggctttcagcatcacttttccaatagcacttgctcacttcgtgtgtctgtgtcatggctttttgcaatatctcaaactttgtcattattataatacggtgatctgagatcagtgatgtttcatgtgacttctgcgacttactgaaggcccagatgataggcggcattttttaacaatgaagtgttttctaattaagttctatacattgttttagatgttattgtgcacttgataggtgatggcatagtataaatacaacttttgtatttaccagggaaccaacgtattagtgtgactgcttgctttattgcagtggtctagaactgaccctgcaatccaagatatgccagtgtagctttaacgggcttcccaggtggtgcattggtaaagaatttgcctaccagtacaggagatacgggtccaatccctgggtcgggaggatcccctggagaaggaagtggcaacccaccccagtgttcttgcctgggtaatcccatggcagaggagcctggcgggctacagtctgtgaggtagcaaagagctggatgtgactgggcatgcaccacacgtgcatagctttaacagtcttgccttggtctactgtgtgccagtccctttgtataacagctttatataacacagtcttctttattaatcttttcaaatatccaaagaaatgttatcatcatgagaaaaccaaaaggaacctcagagtttccataatttgttgaagtttacagcatgtaagtggcagaatcaggatttgaatttacatcttactttgctgattttcttcttttctaaacatcatctcatctctttcataagcagtgaacctgcagctgaaatatattgttaccagagggacatgtcctgggcatgtcaaaagtagatactttgctgggcttcaggtggtagaattaccagaggaacgtgttttaggcatgccatagatacatgattgctgggcttcggatggtaggattacattaacagtctcatgaactgccaaccaaaaactgcctttaaaagaaaaaaaattaaatgattcttattttacaatttgaattttgaaatattaatggaaaattcctaaggagaatttagactgacctttgtgagagataaatgctcagtaacttaaatgtttctctcctagcattgcttggggtttagttgcaggcaatacaatctactctagctagtttaaacattaggggatatgttgaagtatatttgatggcttatgaaaccactggaagggctagaagaacaggttgagatttcagaacactcccacacccagaatgcagttaagtccaaggcagcctgtgaagcagctacatacagccggtgctgtccagccagggctgctcctgatggcaggccctccctgcacccgcccccccccccccccaccaaccaccactcagcaaaatacgtgcccagcatccatccagcttctcttctcctggattttctttccatatcaaatcttacagagttgtgcctgactgataaaatctaagtcacatctgcaaccatcgctaactgcaaaggagtccaagacatggaaattttaattttgcagccattacaatacagaagaatatggtcagagagggcaggaatgggaattacgggtcaattgacagtctcctctacactcactatatttaactcttcttttttcaagttcctctaaatcaggagtatctaacgtgtaacccttgaaccaaatgcaacctctcataccttttcagacattttcattttctgtaatgatatagcacccatgagctagtgcagcctaaaatagtacgtcttggacttcagagagtacctaagaatcttgttaaaagtacacatttctgagatggaccctcacaaatttggattctacatggtgcctaggaacctgcattctgaataaatacccccagatgattattctttgatctaaacataagacagcaattctccttgtttcagttggggcacctttcatgaaagtggggggaacatttcaacagtttattcagttcaaccagaggcatttggcatgtccagcacacactgcatgatcagggaagctcatgcagtgacctttgcagatctggcttgtcatctgatgtgatggagaaaatgatcaaggttgtgagtgttctttgagctcatgcctttgacctcctggttttgatgctatttggaacagtcccaacagagtataaagattgagtctatgtgtagtccaaaaacaggtgggggagaaaagaaacttcgtctgagatttcctgagctgcttcctcagattgaatcttcttaaaaatgaaaagggcccatgagaccaagcttgtcacactcccaatagctgataggacaagacatctgagcacatttaattacagccagagtgggggtgaacacaagaagttctaagaggctcaggcattcggcccaaattcagtgcatgaagtcacagagcaactgaagcccatgcttattttccatcccagaattgtttggagttcaaaagattgtacagattttgcagaacttttgattcacaggagatcacagtttcagaagtgagtcacatagatggaagaagataaattatcatttaggttttgtaactgtttttggaaagctacaaaccctcagaatgtatatcatgatgattcaattttaagagcaattaattaacacaatagtgaatcctgccagccctaaagaatcagtgctcgtaaagtgctgaatttttgagtatgtggatttcagaactgtcacgattttttttcttgcaatagtcctatacttcccaatgttgagggcttgttgctcttattaaaaaacaaaaacaaaagaacactgatagcaaaaaagaattggcaacagatgtgtaaacctaggttcaacattgagctagcacccactggttttctagaccagtttggtttgttacatatcctcttcctcttaatattgattagaattaggtcaccagctagcatctctataaaatacatcttttctctctgcattgatgtaacttaagatctatatttatgaatagcaatgacctatctattaccattgtttctaatgaaatctccactgctgcacaaagcttattctattacatgtgcttctattaaaagtaataacaataaaacttgaacacctagcccctagattctagcctgaggtagaagtcctttgtagatattttcatacaggggcaaagtctctgagctaacttggttctcattaaccacaggagagttctctatgctcaggctatttaaggtggaagaaggcttagctactcattttagcccattatcattattattattattattatttttcttgatgtgggccagtttaaaaacttttattgaatttgttacagtattgcttcggttttataatttggctagttggccttgaggtttgtgagatcctagctgcctgaccaggaatcaacctgcactccctgcagtgaaaggtgaagtcttaaccactgggccagcagagaagtcccacccccttcttatagaggtgccttttctcatctaccaagactaaagttaactttctagccattctaggcattcgccactctctgttgtggtaagcccttgaaatttcctcactctcattgaccctgtgtccctcctccatggtctcactccatggaaacagccctcatcaaggtcagctcctctaggtcctcttcccacaaccaaccggttgacgtctttgagtgcttgttttattgatcacacttcccttttgtacttttttcctctgttggccagggtacccccaaagcaatgaataagcatctcatttctgtttgacttctcatcctctcatcttctgtgtggctaattctttcttcttatatgatggtattctccagggttttgggtgagaacttccaattcccagctgccacttccaacgggactagcagcacttctgcctcagtgccccgtggaagtcatttgcgactccctccgttacaccccacactttctttctgcctatttccacatgcccttgaacttgtctctttctctattcccactgccacttgtgagttaagggtctcctcctgtggcctctggatgactccactgaccttttaactgacctcctgctccaggcttattgcttgcccccttccaccccatctatcctttattccgattactgacaaatttttcaaatataaatcagatcttgatactccttgctgaaaatccagcaggagatccccgattgcctttaaaataaaattcaaatcaattagcgaagctgggagggcctctgcctatctttctaccctcgtctagtgttgcgtattccttgagactcatttttcattcagtcataaacatgaagatctatgaaaaggcctcttcgcttctgtaggcacctgctactttaatttctctgccacaggtcttcgtcccagctccctttgacctggctaccttcctctcacctgagaaaaagaggtggtctcccagaagctatcactgagcccctcctttactctcccatcccaaggtcaggtttagctgtctctccgggcccttcccctcttagatgctctatcacttagttgtgttcgacaagagcttgagctcctggaggccacgaccatatcttctgtatcattaccttctgtacttatcaggtactccatatggatctgatgatgaataagtagctcttcttagaagtctgaaagcactcaattttgtttttatctgaagggacaacttatcacttcattttttgagctctcccttccctctagctatgcaattttttaaggtacggcaatcataacccgatttacctgcattacttgtctacccagcctagtcataatttgagattgttgtttcacttagaaattgatgcagttaaagagacctatatgctgtccacagtacaggcattgtgaagtgaagtttgctcagtcatgtctttacaaccccatggactatatatagtccatggaattctccaggccacaatactggagtgagtagcctttcccttctccaggggatcttcccaacccagggattgcatccagatttcccacattgcaggcggattctctaccagctgagctatgagggaagccatagtaaataaaacttaattgttcatcagatataacaagtaagttgcttgagcaaactcccggagctggtgaatgacagggaagcatgctgcagtccatggtgttgcaaacagacatgacttagtgactcaacaacaacagaagctttactaactgacccagtgttttccctttccagtgtagagtacgtctgggtttaaacttggtccaggcatacagatggcctacaggcacataaaaagatgcaacatatcgctaattagggaactgtaaaaaaactacaatgaggtatcacctcacactggtcagaatggcaatcatcagaaaatctacaaataataaatgctggagagggtgtggagaaaagggagccctcctacattcttggtggaaatgtaaattggtatatccactatggagaacagtatagaggttctcaaaaaaactacagagttgccatatgatcctacaatcccactcttgggcatatatccaaacaataattcaaaaagatacatgcaccccagtgttcatttcagcactctttataagagccaaggcatggaagcaacctaaatgtccaccagcagatgaatggataaagatgcgatatatgtatacaatggaatatcactcagccatgaaaaagaatgaaataatggcatttgtagcaacgtggatagacctaaagattatcatagttaagtgaagtaggtgagggcttttctggtggctcagcagtaaagaatctgctcttcaatgcaggagacacaagagatgtaggtttgatctccaggtcaggaagatcccctagagaaggaaatggcaacctgctccagtattcttgcctggaaaattccatgaacagaagaccctggcaggctacagtccacagggatgcaaagagttggacacggttgagcatgcatacatgtacattgctgttgctcagtcgtgtctgactctttgtgaccccatggactgtagcctgccaggctcctctgtccatgagagtctccagacaggaatactggagtgggtttcatgcacattgctaagtcgcttcagttgtgtccgactctgtgcaaccccatagacggtagcccatcaggctcccctgtccctgggattctccaggcaagaacactggagtgggttcccatttccttctccaatgcatgaaagtgaaaagtacaagtgaagtcgctcagtcgtgtccgactcttagcgaccccatggactgcagcccaccaggttcctccgtccatgggattttccaggcaagagtactggagtggggtgccattgccttctccacatgcacattactatatataaaataggtaaactcaacctactgtatagcctagggagctatatttaatcataataaactaagaatggaaaagaatatacatgttcaactgaattactttgctgtctacctaaaacattgtaaatcaactatacttcaataaaattaaaagaataaacttggtttcaggggtttactagcagaatggccataaacaatctcactaaatcatgttttactcacctacaaaatggggtaataataatctacctggttggtgagaaagtcatatgaaatatcacagattgcaatgtgtggcccttcgtagaagtcaatatatgtgagtcatttccccttttaaatagtatttacatatagagtaaggatgaactgtcacaaggcgtttctcctcccacccccactttttcctatagattatcttgaagtccttaaattctccttttactttaaagccattgcctgccttttgctattaagcagttcccttcagaatgttcagattttgttataagagcatacttacccatatttcaaaatattctacttcacaaaaagacctgcattgagaaagagagaagagtgaatatctttataggattttattggaccaacttggacttcaagctggtttgagtttcacttaactggcctgttaacatctcctttcctgataatggtaaaaacaaccaatctgctatttcttttgccccttcaagattactggacaatcactagagaagaattcgaatctgtgtaggatgcttctgtattttctttataatgtcggatggtaaaatcttgttgagcaataaaaaatctgaaggaagaagtcacatagaactaaacggttattcactgactgacaatctgctgttgctttaggtaaagattattttgggaggatatggtttgtatgacctcagaaaatctgaactcaggactcatttctatgcctgtatcttggtaacttgctttcctggctctgggtggctgagccagttggctgtcttccagagcacatttgggctacaagggaactgcctgcttggctagctggcaggcaagattaaagaggagatgaatgttgtttttggcagcagctgctgttttgttcagggcagtcctaataccagtctgtagttctctgcctaaagaaaaaggctccacagacgccctgcttaccttttcgactttgaaaagtctgtaatgtggaccctggcaatgcatattttaaaaccacttctcacatgcatagaaaagtttgtttttttcccaagttttagagaattagaatcttctggtttcccgaacagcatatgttgccctgatgttcttggtctgcatgcatgttaatttctactaaaggaaaggagtctgcaacctgacttctgtgtaataacacatgttcagatcaagtagatcgtttgctttagggggctttgcagctcctttttctggcatgtggctttttattgtaaggaaggctgttttgcttcggaagaattgatgaatgggtgaatagtccactagagtctcttgagattggttctcaacaaaaacgagatttagataacacctttgctttaggggtcttcagcctcatcttcctgtaaattttatcttttcaagttcctgttcagtactctctgccactgttaaaacctgctcccagaaaaagacccactatatcttgtcattaacatttgaatgtgaattttagtccctgttacctccctctattaggactatttctactgtttgttttgcttctaatagtgcctatagatttctcatttttcatcatgtaaataatctgagggctcttttaactatgaaagggttattggaattttgtgtgctgtggggaggacgtgggggacacttctgacgcatgcctctaaatttaaaaaaaagaaaatctagaaagggccgacaataagattagtttaatgtgtctgtgcagtgaaaggttatcatgaaatgaggggttatcatacaatgagcgtgacctagagagaaaagttgtacaatgctaaaacaaagtagccaaagaaaaatgtcatctgcagaagcagagtgtttcggaaaaaacagcaagatgattacccaagccaaaaagacacattgtagagctgaagtcacaaacgagggacattttgcttcagctttctatctccatagggtgtgtgtgtacctgcccacgcgttcaggcacccgcatacccttgttgaagtttccagaagttagagaaagaggaagggagagaaaacaaagataaatattttgttgatgtattgaaacacctcacttcattggaagtcgattgtctgttaacccaagctactctcaacacagctgagaactaagaaatagattcagaaagccatctgacccccaaattagtgtcagaatacctatacactaaagatcaggctctttgttcatgcaggattgattctataaagtcctttcttggactcttatctgtatggttttgaagcagttgtttccctgacttcctagacagtccaaaacctacagggcatacaacaaatcattgcacagcacctgtggtttggaaagttttcatttgattctcaccagcactccatgaacatggaggcaaaaatgattctcattgtagacactgataaacagatactcagaaggattcactggcttgtttgaagtcacacagtgaggggctcagaggtttttctggatctactttttgtcccctgccatcacactacaagttttcaaaagcgtgaactttttttctttcttgtccttggaaacctttgttcaaacaaaatcttacccggaagcatgaacaaatagaacaggaaaaaaaaaaaaaaagctgagttgcttgcttaaagcaagctttgggggcccagaattctggtgaggcagtatattttccttaccaggaacaacttgaacattacgtagtgctccattcattgcttaattcatccagaaagtaaatttattgagctttgatttatttttctattggtgttggaacaaatatgatcacaaatttagtgacgtaaaacaatacagatttatgacattatggtttggagattccaaagtccaaaatgggacttactgggctaaaagcaaggtgagaccctgtgctgtcttgaagtccgtaagggagactctttccttgccttttttcagcttctagaagccaccagcgtttcttgactcctggtctcttacttccatcttaaatgccagcagtggcaagtcaatgccagatcaggcgagcctgatcattgtcacatcttgctgacccttcttccatcattgcatctctttgaccagctagaaaggttctcagttttataaagaccagtatggttaggttggatttagagaatcaaggataatctctcccatctcaaggtcctttgcgtagtcacatctgcaaagtccattttgccatataaggcaatatattcacaaatttcaggaattaggacatggctatcttttttgccattattctgtctactataactactgccccgcctcccatgggacgtgtgttgtatttgccatggagactacaagaggctagatatgggcatattaacagtaaaactatgttgcaaatcattacctgattatatgggagaaataagtagattaagacacaaaccaacaaaactaaaaatacaattgaaaaacagtcattcaaacaagtacagtaatttggagctccttggagaaggacagtcacaactacataaccaaaatgcttttcccccctagctttattgaggttgttcagtcgcccagtcgtgtctgactctgcaatctcatggactgcagcacgccaggcttccctgtccctctccatctctcggagtttgctcaaattcgtgtccattgagttggtgatgccatccaaccatctcatcctctgtcattcccttttcctcctgccttcattcttttccagcatcagggtctttaccaatgagtcagctctttgcatcaggtggccagagtattggagcttcagtgtcagtccttccaatgaatattcagggttgatttcctttaggatgaactggtttgacctccttcctgtccaagggactctcaagagtcttctccaacaccgtagttcaaaagcgtcagttctttggcacacaaccttttttattgtccagctgtcatatccatccatatatgactactgggaaaaccatagctttgactatacagacctctgtgggcaaagtaatgtctctgctttttaatattgctgtctaggtttgtcattgcttttcttccaaggagcaaatgtcttttaatttcatggcttcagtcactgtccacagtgatttttggtgcccaagaaaataaagtctatcactgtttccattgtttccccatctatttgccatgaagtgatgggaccagatgccatgatcttcatgttttgaatgttgagctttaagccagttttttcactcttctctttgaccttcatcaagaggctctttaattcctctttgctttctcccataagagtggtgtcatctgcatattgagattattgatatttctcctggcagtcttgattcaagcttgtgcttcatccagcccagcatttcacatgatgtactctgcatgtaagttaaataagcagggtgacaatatacagccttgatgtactccttgcccagtttgaaaccagtctgttgttcgatgtctggttctaactgttgcttcttgacctgtatacaggtttctcaggaggcaggtaagatggtctggcattcccatctctttaggaattttccacggtttgttgagatctacacagtcacagaaccagagatcaaattgccaacatcctttggatcatagaaaaagctagagaattccagaaaaacatttacttctgcttcattgactacactaaatcctttgactatagatcacagcaaactgtggaaaatttattgagatatgactgacaaataaaattgtatatatttaaggtgtatgatgggatgttttgatatatgaatacattgtgagatggtgactacagtcagactgtctacagttacccatgtgtatgtgtgtgtgtatgtgtgtgtgatgagtacacttgagatctactcttagaaacttcaagtgaacaatgcagtattattagctgtagtcaaagtactgtacactaggccttcagaacttataaatgaaagtttgtaacctttaatcaatatctccccattttcctccaccccctagccacctttctgttctactcttcattactatgagttcaccttttcttttttttttgacaaacgggagatcatatgatatttgtatttccgtgtctggcttatttcatttagtctttcctttatttgatgagaatgaatcatcaaagaaaagcaaagtttaatatttctagtcactgtttaggatatcagggaagtgtgtgtactatatattagaatagtttctgcatagaataatatggaaaaaatacttttccatttaaagaagtaagctcctcatttcaaccctctcccagaaatactgatagggagttatgactactgctgtgcagaatgctcagtacgtttctaccctgactgctcctccatcctaatgtttagttatgcctgagtgaatgattggattttatgaaagatgaatcctcatcagtagcaaagtacatgacccttgaagaacatgagtgtgaactgcatgggtcccacttatatatggatatttttcaatagtaaatactgaggtactacagagtctcagattggttgaatccctggatgctgaggagccggggatagggtgggctgactataaattatacatggatgactgctgcattgctcaagggccaactgtatatgcaacatcaaattacagtttcagtgtaatagctttaacatagagcttcatgaaatatgtttctcagagatacttgttttttatttttttattttattgaagtataattgttttactatgttgtgttaatttccagtgtgcagcaaagtgattcagttacattcatgcattctttttcatgttttttccattatagtttatcccaggatattgaatatagttctctgtgctatagagtaggatcttgtttatccatcctatgtaaaataggttgcacctgctagtcccaaactttcagtccattccttccccatctcccctcacctttggcaaccacaactactatgtctgtgagtctgtttccgtttcttaggcaagtccatttgtgttgtgttttagattccagatatgagtgatatcatatggtgtctggcttcctctgactgacttcacttggtgtgataatctccaggtctactcacatggttgtaaatggcactgttgcagtctactttatggctagtgtgccatttgatacatgtatcacatctttatctgttcatctgttgatgggcatttaggttgtttctatagcttggctattgtaaatagtggtgcaatgaacattggggtgcccgtatcttttcaaatgatagttttctcatgatatatgtccaagagtgggatggtaaaatcatatggaaaatatatctttagttttttttgaagaacctccatactgttttccatagtagctgcaccaatttacattttctcaggaatatttgagtgtattaacagatttaagtttagtcctgcccaaataggccctaataaattgggcaaagtcatctttacagatgtttgtatatagttgatccaaaagaaattgtagccctggtgaaattactttgcaattgttaatagatttcgaatgtcttacaaaacttacaattaatatattaaactctcaaaaacatataaaattataaaattaaaagttctgaaaaatgtaaaatattcagctttgacttggaaacaagcttgtcttcatatgcatggtatttaaataattattgaagtctttgagagatggtgtcagagtcctcaccagtgatgtaacagcttcctgggagtgctatgacagtatgaggtggtgaagaggacaggatttcaaactgcacacacttgagttttcattctgatctcaccacggagtgaaagtgaaagtcactcagtgtccgactctttgtgaccctatggactatacagccaatgggattctccaggccagaatactggagtgggtagcctatcccttctgcagcagatcttcccgacccaggaatcgaaccagggtctcctgcattgcaggcagattctttaccagcttagccctcaccatgtacaagtcaccaaatctctctttattttggtttcttcatcttcaaaattaagatagatagatcttaaattttgtttgtgatcagttggacaaaatgtttggtacccagtaaatatcagtaagggaaagttgtattcactgctgttcagaaagcagcagcgtttgtgcacacattcagacgttctgcctggtggtactgatgaccttcagtatacactctattcaaagccaggccctctatttgagacctgggtctcaccccttcctgtcctcaagaacattgctctaatgtacctttcttctgacctacagtgccagttgcatctccttctggattgtccccataggtatacagacagcctggtatttctaccatcttacaaataagtctccccccattccaacctaattcttcaccaaccacattctcactttgttgttatttctttatttatttatttgctatcttttgaaagacgcctcttttaaaaaaagctatctgtttgcactgtttctaattgctcagccttcactctcaaatctgcccctccctggccttttccaaactgtttcaataaaaatgctcttgttaatgtcaccagtgacttctatgctgctaaattcggtgatcagttctcagtcctcatcttacttgatctgttatgagtatttgatgtagttcatagtttgacctccttaagggacttctgttttttttttttttttaacttgggttcctcctcttcctcctcccctgtctctctctctcaggctcctttgtgtgttctaaatctttttccagacctcttaaggttggagcaccacaggacccagttatttgttcttttttctgtttgtattcactcctttgatagtctcatccactcttttgcttaaaattccatttatgtatcaaaggctgtcgtatttatatatccagcccaaactaccctcctcagtccagattcgaatatcctgacctactttcatcactggggtatcttaaagacatctcagactgaggacattcaaaactttactcctgatatgaccccccaaaccttctctacccctcagtcattcccgtattgataacttgatggtagtactgtccattcagttgctcagaccagaatccttggaatcatccttgactctgagctaaccatctctaagcagtacacggcgacagccctttcttgcttggattatagcagtatccccaaattggtcttcctgtttctacttgttgttaaagcctgagtctgttcttaccacagcaatcagaagtgatctttttaaaatttttggttttttttttttagggaaaaaatttatatttttagagcagtttgtagcaaaattgagaggaaggtacagaggtttccccaatgccccttaccctgacacatgcagggcctcccccgttatcaataatctcccaccagagtggttggtacatctgttacagctgatggacttccattgatacaccttaatcacccagagcccatagtctatgctagggtttactcttgctggtgtattttctgtgagtttagacaaacatataattacatatattcacaattatagtatcatatagagtactttcactgtgctagaaatcttctgtgctctgtgggcttcccaggtggctgagtggtaaaaagaaaatctgcctgctaacgcaagagatagagaaggcactggcgacccactccagtactcttgcctggaaactcccatggacagaggaccctcataggctgcagtccatggggtcgcacagagtcggacgtgactgacgtgacttagcagcagcaatgcaagagacatgaattcgatccctgggttgggaagatctcctggagaagaaaatggcaacccactgcagtatttttgcctggagaatcccatggacagaggagcctggtgggctacagtccatagggtcgcgcagagtcaaacacagctgagcacacatgcatgcatgctctgtctgtgcatgcctcccgctccaacccctggcaacactgatcttttaactgtttgcacagttttgccctttccggaatgacagaggagttggaatcaaatggtgtagagccttttcatattggcttcttcactttgtaatgtgcctttgtttcctctaggtcattttatggcttcatagctcatttctttttagtgctgagtaaaagtccattgcccagatataccacagtttattcatctattcatctgctgaaggacattctgtttgtttccaagttttggcagttttgaataagctgctataaaaatcagtgagcaggtttttgtatggatatatattttcagctccttgggacaggaccaaggagcatgattgctcgattatatggtaagtgtatgttcagttttgtaagaaataaccaggtttttagtagtattattctatgtcatctgtctcctatgctcaaaatcctgcaacgaatccctcttggttcacagtaaaagtcaaaaatccagaggagtatacaagaccctacatgatctgacctgttctctttgacatcatcattttcattgctccctgctctaatctcacatgcatgcatgtgtgctaagcttcagccatgtccaactctttgcaaccctatggactgtagcccacccgtgggattctccaggcaagaatactgaagtgggttaccatgccctccttcaggggatcttcccaacttagggatagaacccaagtctcttgtctcctgcgttggcagatgggttcttgaccactagcaccacctgagaagccctgctttcttcttgctcttccttaaataaagcaggttccttaaatcaatgagatgcatttcttttataatggtggggggaggtacactttctaaacattgtcagggtagtgacatcccaagtaggttttttctttattctccaagtgtttggtaatgataatatattactttaataataaaatatcttgaaagattcaattgaaaacaacaaaatagaccttagggacttagcagtatcttctctttctctgaatataatactctcctacagacatctgcatggataattcccttagtgccatctaatctttgaaaaacattgccttcgcgatgaggccccaccaaaatagcattttttttgcagtcattcatattgcagtctctggggaaagagaggtggcattaatagctggtactgtggccttttctctagattcagagatgcctggggatttgacctctctaccttcctttctgtatcaagaactcaagtaactgataggcgtatacctaaacttcacccaagagaattctgctgaagttactaggtagcagaacaatcaccaggatgcattttattgttgagactgttactggtgggagtagctataatggagaatgagtggcagctcatggcatgtccctgaaggggctactcgactagcgagatataagcttgagaagtggtcctgcccacccagcattgtggatcattgccaaatgctccagggatatagtgatatgtggacattagagatggttcaggagtcagttatgagttctaccctgctgtgcgtgctgtttgtccccgctcctgtttcccttctcaaagctcagtagtacacttggcgctgggtgaagcctccaaagcctcatgagtgtaactgtcacctggaacccaagaccctgctgctagtagagaacagtaggcattgtaattccagtccctgtactgagatctaatttttctcttttcatggtgcacttttaacatactatataatctgggtatttatcagttttcttggtcatgctatgccttctctcactagaagctaagcttcctgagggcagggatttttgctttttttttttaaactaatgtatccatagcatctagaacagtgcccagcacacagtagcactaggtgcttaataaatatttgctgaatgaatgaatgagtgaacaaatgtttgtgtagtgtttcttcactgccaggcataagacaaggtaaagagaaatcaatagaatttttgccctaatatttctttttttttttttcattcagtcttactgagatataattgacatataccctatataagttgtacggcgtagtaatttgacttacatcatgcagtgatgaccatattaagattagtgaacatctgtcatctcatatagttacaaaagtaaagaagcagaaatttttttccttgtgataagaactcttgggatttactctcagacaactttcatatataacatagagcagtgctaactatatttatcatgttatacactacatccctagtagttatttatctttcgactgaaagtttgtaccttttgatcacctttattgaattccccctccctcatccctgtgcctttatattccttacagcctagaatatgaataaggttattagggactggccctttatagagatccttagggaggattccaaagtcagatcatgaaagagcgtgttggagaaatctatttcaagggagggttagattttagcgatgacagtatgagagacactttgagtttaagcattgtatttacatacatgaagggaaactcttaggggagatgttatgtgttgggattgtccaaaaagcagaatccccaaacaaatcatttacaccagcggttcccacccttttcggcaccaaggcccagtttcatggaagacaattttcccacaggccagggtagagatggggatagtttggggatgattcaagcatattacatggattgtgcatgttatttctgttatttattactcagcttcacttcagatcatcaggcactagatcccagaggttagggacccctgatgtacacaatttagtctttatttttggcccaagggagaagagcaggatcccaccaagcccaagtagccttaaacaaaattaagcaggattgcttaacattcatagattacaatggtaaaacaatgaagggattttagttttgttcacactccattattatctatgtaggtagtattgtagtcttagaaatttcagtaaatggtcattgtaacttggtccagtataatatctattaaggtggcagatattaattgaaaataataatccagttccatttgatacatggctggttacataataagtaggaaagatttctagccatgtgcagatgggcctttgtgtaattttaagattccgtagatgaatgttaactcataaaagaattctcacattttaaaatatcatcacatctccatgcctatgctcctgttgtttatttttcctggaatgctcatcccttccctgtcaactcttgcaaattcctcctctgtccaccagaatccagttggagtcacattttctctgaggcttttcttggcactgcctttctgccacaagttctctcccttaagattaattgattaattgcttcctcctctgggttcccaaaacatttatcacagggtgtggatattacttatttccctgaatctgcatttcagaggagtcttatcacctttgtttttctggctggctcagtccctgtctcgtacaagttcaataaataggtaccaaatttgaagcgttagactcttttttaaccttgatcactgattcatctagcaaatatttagcaagagctttttatattccaggtgctgttatgtcttgtaaagatactgagggggaaaaaaatagatgccccaatctttggaaatataaaacatagggtgataagaaaaagtaagccatgcataaaagtaactatttaacatggttgaaagagttatttggaaagagaggtagcgtgtgtgtgtgtgtgtgtgtgtgtgtgtgattacttcatgctggtattcaaaaatgtcttctcattgactaaaaaaatatttttccttgttaaatcgctaaaaagctgatagaaaacaatgattcttttgatatcccacaaattagattaaattctctcctaaatatctctccctcactttaactgggtgttccagtaggttattgggttaaagcaatgctcagagttttgctgttacttgctatacaatctacatttaaagtagagaaaaaattttttggtgccttaaggtacaaattttatgcattccctagtttttagaaaatagcttaagtgatagattcttttcatgttgctacaagttcatttctaattgccattggggaattgcccatagaaagcttttgacaaaagttaatgatactgtcattgaaatgaaaaatccaaaccatattttaactgagaattttaagaaatttggttagcatagtttgtgtgtaaggcatttaattgtatttaagccaatagtattaaaagaaaaaaaaaacccacaagatcgattcttttttccacattaaggtagaaaatgttagttgttaatagtttgagtgactgtggatatttattgacggtcaccagcatttttttctcttttcatttagacttggattatcacttgcatttatcttcaactgctcctatttaatcctctcgtccacactcaagggatctgccggaaccgtgtgactgatgatgtgaaagacgtaacaaaattggtaaggaatgctttcaattgctctgactcttggactttttgaaaaagatttcctttttttcttgccccagattagagtctttcagcgatcgggagagaagtcactgagttatcctgaagggtttgtagagagcaggtcaggagatccctgcggtcacggagcatcttgttggtcaagctggccgccgcgcctcgcttgaggcactttgtttccttgctggcctcctcttctcctttgcaggcagtgaaggacactggcgaggctctgtctgctggtgtgtgagcactagcttgctctccatgatctcgtaggcaagcttcattttccctccacacgtcttcctgctcttctctaaggagcctaacaaaaggaggtctgagctgctcattctccggtttccaacctctctaagaccccgttacacgcgggtgggtgtttgccccctcagtaaacacagctggagtcgtttgttgcccaaacgttgaccagacacatctcccacatccgtcccctcagcaaaagccgcttttcattagtgcgccttcgtcccggccagcctcaggccagctcctctcaagatgcagaccgcggagagggggcgtgacagcctctgaaatggattcctcccgaccctcaggatctagcggccgttgtacgtgttcattggagctacgttgtgtgcttttgaaatgaacacactttgaaaagccgtgttgtaagttcctgatttaaacgagcccagtggcactcaattatttgaatattgtttcgagagcagagtgatgtgagaataggaacgaagtgagggttgtaggatgtaaaaaagaaaggaaagtatatttgttgagatatgtatctttcctactttgatatgcatttcctggtgtatatgttgttattttgggttcatagccaagcttcaaaacagaagtttaatgctacgatctgagtcttgcttagcttagtctcaatgtagaattaagaatatacgcatacatgcacacacacacacacaccatgcagatttctttggatacctacaaagtccaggcttaaaaatagtctctggtgctgtatctgaaggcgtatcaacatgttttatttgaggggatggtgatcctagcactgtaacatttacctcctatatgcccagctgggtttaaggatgggctgggaaagtacttttttcaaaacataggtcatgatctttttcctcaaactgctcattagtttgtgagccaaggaactatactaagaagaaaacatttatattcaaaatttggtatgggtcaaaggccctcatgaaatgtttgttcgatgaatgaagtacggatgagcctcactgtgcagcaaccaaattatctgtggcgttcatgaaagtcacaggtgtctgggcctcactgtttaaacaggtctgagagctaggcatctacattttaaagatattccgtaaaggagatttaagaaccattgttttagatggtttatgctgtcaaagtttagagaccaaaatattgtgaccttactttaacctcatttcttattatggccagttttatctacgttgtatcagttcagttcagttgctcagtcaggtctgactctttgcaatcccctggactgcagtactccaggcctcccagtccgtcaccaactcctggagcttgctcaaactcacgtccatagagttggtgatatcatccaaacatctcatcctctattgttcccttctcctcctgcgttcaatctttatcagcatcagggtcttttctaaggagtcagttctctgcatcaggtggccaaagtgttggagtttcagtttcaccatcagtccttccaatgaatattcaggactgattttctttaggatggactgatttgatcgccttgcagtccaagagactctcaagagtcctctccaacaccacagttcaaaagcatcagttctttttctttgacactcagctttctttatggtccaactctcacatacatacatgactactggaaaaaccatagctttttctatgttgtatgggtttacatatatgttagattaatatgtctccaaaatagacttaaagtaggtcacagctgggaaattaacaactcttaatggggctatttgtggaaccatggagctacaatgagcagagatcagaatttgtcctaggcatccaatttcaaatatgtgggcaaggaatcacagatggaaggtaatggtgtatctgaccacaggctaagcatgtccaaaattaaaatggcatttaagaaaaattacttgtagtcagtattttttgctgtttgaagaatgttacttaataagcaccacttcctgtgaaatgtcaaaccgatattttcaagtggcataagtaggtattgtaagcaccttccaagattttctgttcttgtctttaaccatctgcttattttcagtctgttacatatcagttgaaaaatgcaagaaactttgagaaagaaatgcctggaaagagatacttattaacagtaaaatattaatataattcctttccccagggggcaaatgtaaaaccattaagctgaaaaaaagtcttttctcccttccagcaactgactcagaggggaattttttaatttcaagagtcgatctaaatgaaattagtgtgtttactcaagattattgggggaaaagtcaagttaataacaaaaaaggatttagaagatcacttctgattgaataaagacctacttaatgcacagccagtatttcatagagtaggaaattgaaagatataaaataatccttggtctcagagtgtttataatctagtttggggctaagccatctctatgaatatttgaaagcagatcactaatacacaataaccacatgaaaatgggtgctatttaaaatattttctggtaaagtatgggatccgacttgtactaattttttggttagaatggattttagcatctgacagacatgctctttggccttagataagaaactatctttctaaagctcagttcttcccaattttgtggtgtagatggaataagagaatgtgtgtgtgtgtatatatatatatatacaggaatcacagatggaaggtaatggtgtatctgaccacacacacacacacatatatataaccacagatattgtcacataatctctctgtgcctcagtttcctcatcattgtaatagattaatagtacaacaggggttagcagtgccaaccttctggcaatggaaaatcgtctcacagcctgtagttggccctctgcacataaggttcctccctagctgtggtttttgcatccacggagtcaacaaaggtggattgtgtagtagtgtaatgctattgaaaaaaaataggagtatgaatagactcacgaaattcaaacacgtgttgttcaaggatctactgtacttaacctcacagagtgattttaaagattaaataaattaaaaggacagtgctaggaacatagcaagtgcttgctaaatattatgttagtaatggtagtatagggcccccttggtggctcagtggtaaagaatctctcaacacaagagacccggatttgattcctgggttgggaagatcccctggaggagaaaatggcagctcactctagtattctcgcctggataatgctatggacggaggagcctggtgagctacagtccacggtcacaaagagttggacacacttagcaacggaggatagaatggtagtgtgatggtcgtgatgtttgtggggtcgtaggatactggagctgaatttagagaatgcagaatttcataaataggaaaactgagatccatgagtggtgaggtccagctcctggtcccagacctgtgctgtcttctaggacagtggttttcaggctggcttaagagactacccagcagctctgctttcatttgtgtttctgggtttctaaataagacttgggtggaacaaagaattgagcttctggaaaaaaatgtttgcaaatcacgtctctaaactggtgttttgtggaatattacttgagaaccatccagttacaatctctgagggtccttaggaaaagtttagccatcagggccctgcctcagaaatactggattgcagctcatggagatgagatgtaggaaacctaatgtgttggattggcgtcccgggcaatagtcatttgcataggtcaggactgctgaggtcataatatacttacaatatggggctgtttccatatttgaaaagaagtggcgttcccatccttagcctacaactcattgatttcactaattcaaacagggacatgagtgacttttcagttttatggctacagataaccacagcctctctctggagaacagtggagcaaaaaagcatcttgaagtaggtcaggcttactggggtgtttgatatcagctctgctgttatccagctgtgtgactttggacaagtaaatctctgaacctttctgggattcaacttttggttttgaaaatgaggaattaggacataatcagtaattcttaatctagaattcataaactttcaaactctttccaatgaaattccaaattatgcttgctgtgtgccttatgtgtttctggtggtagtttattcgctaagttgtgtccaactcttgccatcccatggactgtgcccgccaggctcctctgtccatgggattatccaggcaagaatactggagtgggttgtcatttccttctccaggggatcttcccagcccaggaattgaacccgggtctcctgcatggctgctgctgctaagtcgattcagtcgtgtccgactctgtgcaaccccatagatggcagcccaccaggctcccccatccctgggattctctaggcaagaacactggagtgggttgccattgccttctccaactcctgcattgcaggcagatgatttaccaactgagctataagggaagccctatgtgtgtttctaagaacatgacaacttttcatctgcttcccagagaagtctgtaaccctccccccaaaaagataagaactaacaaattggataactagggaggcccattttagccttgagattctcttattccatcgtcctacttcttcaggttgtacatgttagaataatccagttatgccttgactaaaggaggttatatcagattagatttacttgcttttcaggcataacgtttgtacattttatctgagaaaaagaaagtgggttgagaatacctttttacccttttgctcatcgtaatttattcaactaaaatcattcctttgccaatgctgccagttccacctttgctgtaggtggcaacttgcactctgcccacaaatcttaagtttgtttgcttggggtgactcccatgtcacagaagcgcatggtttgtgactttattgtcattttctttttaatttcttcttggacattttgtactacacctatagtccccatggtttccatttgaaatccttctggcatgtttactcagcataatagttcatctatttacagaacattttgctttgtttctaaaaaatgttgcaagacttgtgttaaatggcaaactcagacctaaagaaagggtatttgggaagggggtgaatcaaactttaaaaacttgtatctttggggtggttcaactgcagctcttagtgactgtgttgataaaaaaggaatccaaacattgatatagatcaaattagtttttccttctttctactgtttccttcatttttgataatttttcttcatctgggggaatttaattgaatgtgactttgctgctttttgaaaacatttttatcgttatctgttgggtaattatttgtcttccttaaaatgtttaaggcaggtttctgttctatcccccatcttgtaaaagtggaaatcactgtcttttcaaggtctgtctatagatcagtagggtaaagtcagaaatttgtggctttcctggtcttgcagtaggcaattattttaaacagattaatacatgactcttacagtttggcataataggagattataaaaatattcttagataacaaatttcgcacttcaagtggacagttttgagtagtgctgaatttttattctcttcaaatacaatgttctttggatagaattaccactgcattaaaatggaggattggagtctctgagtcttcccatttctaagtatatcttctctttaaaagcagaggccccccatagttttgtctgacaattgaagaacaacggtttgatagctggataggttttaaagttgatttttcatgcaatctttagcattttactttctgctcctgcagtcagtagatttttttcccctctatttaaagctaaattttggacttaaacagtattcaaaggacagagtatattagaaataatatttgtaaaaactgactagctctgttgccaagcatgtcaatcttatcataaagaaaatgttgttctttgtaagataaaccacttaggtacagtatctcctgctccttgacttttttacagcagatattattgtgtgaccatccaagcaccacgcaaagcactgtctgtggattctctgttttattcattgcaaccctaggaggtaatgattttgtccacctgtgtattctttaccgtctgggtcaaagggaagcctgactaatgcaccagtgtattgattaggcagctgaagcctagtgatggttagtaacctgatgattctcacttggaaactgggagatgactagaggtatgaacccataactgcttatctctggaacataagaacccagttcataatttatgatgtcttaacatgtcagtatcaactgcagtttaagaagaatcattctatcctcttgaattgtatttcctaggtagaagtctccttattttataattaggaaattatagattagtactacttaacaggagtcatcatcataaggtgtgttcatgaagcagaccaacatttttaaattaatttttattggagtgtcattgctgtacatgttgagttagtttctgctgtatagcaaagtgaatcagttatacatatatcccctcttttttagatttccttttttagatttaggtcaccacggagcatttagtagagttccctgtgttagacggtagagaccaaatgcttttaatctcttttatttgaaggagacaaggatcatttaaacttacttaggtattcttcactgagaaaagatgacccagaaagtcttgtgagttgtcatgttaatttcttctaaatcactgattgagttattatttaaaaaacaaaaaagcaattgacctggtgagatttttagtcagtattaacaagaaatggcttataaggggaaattaaaaggcagaaagccttgttctgtgttatttctgaagaataaaccaccagtgttacactaagctgtggcatgggagtaaactgggatattactgggatattttaagtacaagcatagaaggctttttttgctctaagaatcagcagtgattcttaaacttctctgtgtcacagagactttgagaactggactctttcctcagaaaggtcaactatgtgcgcactgttttatgtaggctcaagggaatcatgagtgtactatcattgcatttgatccttatcaagatcttgacagaaacaactgagacaagtatctcaccgaggatgtccagaaagccactgatttcacaagactgagagacctcaatgatgtttggatcttgagatcagtgatctagagagggagttaaatgttctgactttgagttctttttctcccaagtccaaatacctacagggcatggtaagcagccaatgactggcttgcaaagactttcttggccaagtttccagtatttccacatgctattatagccacggtaacttacccacatccaaggtaagagaaacccaagtaagacagtaggtgttgcaagagggcatcagagggcagacacattgaaaccataaccacagaaaactagtcaatctgatcacacagaccacagccctgtctaactcagtgaaactaagccatgccctgtggggccacacaagacgggcgggtcatggtggagaggtctgacagaatgtggtccacgggagaagggaatggcaaaccacttcagtattcttgccttgagattcccatgaacagtatgaaaagcctaaatgataggatactgaaagaggaactccccaggtcagtaggtacccaatatgctactggagatcagtggagaaataactctgacagaatgaacggatggagacaaagcaaaaacaatacccagctgtggatgtgactggtgatagaagcaaggtccgagcctgtaaagagcaatattgcataggaacctgggatgttaggtccatgaatcaaggtaaattggaagtggtcaaacaggagatggcaagagtgaaagttgacattctaggaatcagtgaactaaaatggactggaatgggtgaatttaactcagatgaccattatatctaacagtgcaggcaggaatcccttagaagaaatgaagtagccatcatggtcaacaaaagagtccaaaatgaagtacttggatgcaatctcaaaaacaacagaatgatctctgtttgtttacaaggcaaaccattcagtatcacagtaatccaaatctatgccccaaccagtaatgctgaagaagctgaagttgaacggttctatgaagacctataagaccttgtagaactaacacccaaaaaagatgtccttttcatcatagggtactggaatgcaaaagtaggaagtcaagaaacacctggagtaacaaggcaactttggccttggaatacggaatgaagcagggcaaaggctaatagagttttgccaagagaacatactggtcatagcaaacaccctcttcccacaacacaagagaagactctacacatggacatcaccagatggtcaacaccgaaatcagattgattatattctctgcagccaaagatggagaagctgtatacagtcagcaaaaacaagactgggagctgactgtggctcagatcatgaactccttattgccaaattcagacttaaattgaagaaagtagggaaaaccactagaccattcagatatgacctaaatcaaatcccttatgattatacagtggaagtgagaaatagatttaagggactagatctgatagatagagtgcctgatgaactatggaatgaggttcgtgacattgtacaggagacaagtcaagaccatccccatggaaaagaaatgcaaaaaagcaaaatggctgtctggggaggccttacaaataactgtaaaaagaagagaagcgaaaagcaaaggagaaaaggaaagatataagtatctgaatgcagagttccaaagaatagcaagaagagataagtaagcctttctcagtgatcaatgcaaagaaatagaggaaaacaacagaatggggaagactagagatctcttcaagaaaattagaaataccaagggaacatttcttgcaaagatgggcttgataaaggacagaaatggtatggacctaacagaagcagaagatattaagaagaggtgcaagaatacacagaagaactgtacaaaaaagatcttcatgaccaagataatcacgatggtgtggtcactcacctagagccagacatcctggaatatgaagtcaagtgggccttaaaaagcatcactacgaacaaagctagtgaaggtgatggacttccagttgagctatttcaaatcctgaaagttgatgctgtgaaagtgttgcactcaatatgccagcaaatttggaaaactcagcagtggccacaggactggaaaaggtcagtcttcattccaattccaaagaagggcaatgccaaagaatgctcaaactactgcacaattgcactcatctcgcatgctagtaaagtaatgctcaaaattctccaagccaggcttcagcaatactcaaactgtgaacttccagatgttcaagctggttttagaaaaggcagaggaaccagagatcaaattgccaacatctgctggatcatggaaaaagcaagagagttccagaaacacatctatttctgctttattgactatgccaaagcctttgactgtgtggatcacaatcaactgtggaaaattctgagacagatgagaataccagaccacctgacctgcttcttgagaaacctttatgcaggtcgggaagcaacagttagaactggacatggaacaacagattggttccaaataggaaaaggagtacgtcaaggctgtatattgtcaccctgcttatttaacttctatgcagagtacatcatgagaaaggctgggctggaggaagcacaacctggaatcaagattgcagtgagaaatatcaataacctcagatatgcagatgacaccacccttatggcagaaagtgaagaggaactaaaaagcctcttgatgaaagtaaaagaggagagtaagagttggcttgaaactcaacattcagaaaacgaagatcatggcatctggttccatcacttcatgggaaatagatggggaaacagtggaaacagtgtcagattttatttttgggggggctccaaaatcactacagatggtgactgcagccatgaaattaaaagacacttactccttggaaggaaagttacgaccaacctagatagcatatccaaaagcagagacattactttgccaactaaggtccgtctagtcaaggctatggtttttcctgtggtcatgtatggatatgagagttggactgtgaagaaatctgagcaccaaagaattgatgcttttgaactgtggtgttggagaagactcttgagagtcccttggactgcaaggagatccaaccagtccattctaaaggagatcagtcctgggtgttcattggaaggactgatgttgaagctgaaactccagtactttggccacctcatgggaagagttgactcactggaaaagactgatgctgggaagggttgggtgcaggaggcaaaggggatgacagaggatgagatggctggatggcatcaccgactcgatggacatgagtttgagtgaactctgggagttggtgatggacagggaggcctggcgtgctgcgattcatcacgtcacaaagagtcagacacgacttcgcgactgaactgaactgattctcttatgcatttccccccagtatcactgagtatgatcaatccctaagatagccaaaaaaatgaaaagatagcaagtgggcctgtctagtaatagagtgaaagtgttagtttctcagttgtgtccgaccctttgcaaccccatggactatagcccgccaagctctctgtccatggaagtctgcaagccagaatggtggagtgtgttgccattgccttcttgaggggatcttccctacccagggactgaacacagatctcccatatcccaggcagattctttaccatctgagccacctgggaagcccatcatatcacaaaatgacttgttttggaagttttgtgcattttctaatctggtacagtattcaaatcctcacactccaaactgtttgtttcattctaataatttgagctttgataaattttccatcaattaggttctatttcattttaatttttagcctgaacttattttactaggacagttaggttttcaaaatctgtagccttggttacatatccacgtaaccttaccagcaggatgcttccttagaatctaaagcacgtctctggtttttcagcttctaatctctgtagaaatatttaatgcgtgttcagtactttcccactggtcttctaaactgccctggtctttcttctctctttgcttcagtgcatacttccaaactgttgctgctgctgctaagtcgcttcagtcgtgtccgactctgtgcgaccctgtaggtggcagcccaccaggttcctccgtccctgggattctccaggcaagagtacttccaaactaaccttgctaaattgactgtcatgttttcttcctgcttaaacacattcagtgtaacaccactgcttacacgaggaagttaaatccaactgaattcttagtaattttctccttcagcttcttcatcttacagatgaggggtagaggttccacaggaaggaagcaatgtgcctaagacaagagtgacttgtagggctctagcggtggaactggttccgctgaaccttactgctttccacttggcctccgtggcccaacattcaggtccctcactgatgtgggtctcctggtatatttcttacctcctaccggcgagagcctgaatgatctgtccctggtctacaatgtctttgtctttgcagacgtcccttccttcctatatttagaatgcccctctcccttgcaatttttaagtacttgttcacacacaacactaaataagtattttaaacaagttacattatccttgtatagtcttaataaatccactagctcagttctgtgattcccattttacctatgtggaaattgaggctaaagaagatttggtaacttgcccaagatcgctgaattagcacgtggcaggacctggatccagcctgagcagtgtgtccccaggacctgtgctgtgagtccttcatcaaagtaactgccttgaaggaacagcttatcttcctagttccaggccaaaggctccctctactctatcaaatttctgtagtgctcaccatgcataagagaaacagaatttatcacaaggttatctgtgctttttggatgctattcaacatactatgaatgtttataaagtaaaataataattcatgaagtggccataaaaaatatacaacttgacttcctaatttctcttccaaatgtgattggaaatgaaccagtgcattccaagaaagtaataatgtggagactgatcaacagatgactgctgagaccagcacaaatcccagagccgggatttgtgtgctcactcgcactgtgtactcatgtctgtgaccccgagatgccagttaacccctctgagcctccttgtgtcgttcggtaaaatagacccaataatatgtatcttggttgtggcagagactgtgtaccaaaaccttttaaaattttaaagcatttttcaaaaatagtattccttttcagctcccttagaaactgaataccagtaaatcagtttaaggcagaagttattatgatatactgccacctccccacccccaccaagtggtaaggtttctttgacttctttgcagcaatttttacatgtcagttactaataaaacagaattggccaatgtatcttttacattttctctgctctcttggtacatactcagatcataagttttctgaatactaatttggtcagttctatatttattttccgataatgttaactgtgcttaaggaagggggctagattgtcaagcacctgtgttcagaacacccaccattttgtgccatgcttctccatctggaatggctttcacttacctggttggttcgtaacaaaacagaatggtgctgctcattctgattccagcttttatacctgtgaagctgttagctctgctttccaccagggcttccataaaatgatgaggtccatctgcttttcaaatatgggggtgaagatccacaagacaaaagaaatcctggaaacatggtgggaagtttgaccaagagaaagaacattaatgtgaaaagtcaccctgaacttaaagaatgccacctcctgtggcagtgcagatatgttctcagtaagcagtgcagacttgactgttttcttgggggtggcacgaggagggatgttcatgagcctcacaagtgggaaatatctaggacagtgtgcagagagtagatgggtgaccatgtgtagctgagctgagaggtaacagaggcctggctgtcagagacctgagttctagtccagacttaacaggtggtagtcatgtgacctcagtcaagttatttgacctctttgagtcttaagttcttcattcgtcaatttagcaatactatgtgaaagtgattctgaggcttggatgcaatcacacaatgtaagcccataacgaacacggtgctagaacatggttaagtatttggtaagtgttaggctggaggctgagatgagtgtgaggtggttccattggacgttggatggtagcacgcataatgggatcacctgctgccttggctcccctctgactgcatatgcctttctctagattcttttctcagcaaattgttctccaattctagaagctattggcaaagccaagacgaaacataagggctgtgttctgggagtcttgtcagagatgaactagtctgaaaatatgtaccaggttctagctcacgatggagaatagtgatgattttagaaatagggtaaagcggaaaatgagtcttccagcaggtagacccactgaagatataatagagcaaaaccacttttttacattgtctataaatgggccatattctacagaaggaaattttaactgtgctagaagggtgagatgtcagagctggtgatatgtagaaaaggagacaagtgaaccgaaaactctgtaacttactagaacttgtgccttggaagtcagtttccagtatagctctcagtaaagaatatggattgtttatgatgcttggcacactcatctaaattcttaaattgactcttagacacaggtactttttctttttttttttaattggaggacaactgctttacaatgttgtgctggtttctgccttacaaaagtgtgaatcagccatatatgtgcttatattcccccttccctgtctcacccccatccccactctgtgataggtcatcacagagcaccaaattgagctccctgttatatggaagtttcccactagctagctattttatacatggtagtgtatataggacatggatacttttatctctactttacagatgagagaaaccaaagtagagtttagattttttctaaattccctggttctaaatcaggtgcttgttcaacttatgccacaatgactgatggaaatgggttagatattttttgaaagtcttttaagagaagctagttaaacagttgaggcatctcaaatgttcagtcccaggcaagtaggttacgttatatcacaaaactgaatctttctaaattaattaactgataaagcatgtgcagcttataagtatcattgttcttttgaaacttaacacttttttttctaggattaacacagaacagtagttctctaacatgagcacacatcagaatcacctggaggacttgtttagtaagatgcagtaggtctggtgtggcccgaggctttgcatttctaacaggttccctggtgcccttgaggcatcacttggagaaccacttacgagaaaaaatacaccgtgttaccgatccttcagaggaataaataggaaaatagtcctgaagggaaattccaagaccacagatggaagctgaaattcaaatcatgtttccaaactcagtagattatagttagccacccataactgaatttggagtgaaaaaagatttgtattattacttcatttctggagagtgcttttgattgcaaagggaaatcaagaatgaaaaatcactatgtatgtaaatgttgaaaatcagtggtaatttaaaagcaaactaggtttgcaggtgtttttctctaaaccactaaaaacaatatgattaactgatgtgtatggattttcttacagatttttttttctcttttggtctctgtaggtggcaaatcttccaaaagactatatgataaccctcaaatatgtccccgggatggacgttttggtatgtaaactgtacatttctgggtttcactgtggtagctgacaaaagaaacggggtcattcatattgagataggaagctatctgccattgaagagtttgctaattgtcagaatttgaagaaggtatttttggaatttgacttatatatttatattttttcctcaggcaactgctaaactttggtttggtttgaacatttcagcatgtgtctcccccctctattcccaaagcacataagatcaccttctttatagctagccactgacttctctttttctttcagccttcctccaagcaaaggctcaggtgtaaaattatgtaaattactttcatacctgaaaaggtcctatataagtctcctatttaatttgagaacacaaaatgttttatctctggatttatttgcagtgtgattgattcttcaaaatttgcaataaaaatgtagctatgattgtaggtacgcttttatgactgtaaccaagaattttcattgattttctaattacgtagtgttagtattaagacatgaagaaatatttcacatatagggactaatgtaatgactgtggacccgtcacataacgtcagatgttaccattttgcaatatttgtttcaactgtattttttaattggagtataattgctttacagtgttgtttctgctgtacaatgaagtgaatcagccatgcgtatacatatatcccttctctctttggacttctctcccacctgcctccaccccacccatctaggtcatcacagagcaccaagctgagcttcttgtgcttttatatataaatagcaggttcccactagctatctgttttacatatggtagtgtatatatgtcaatcctaatctcccaattcatcctaccctttcccctatccctctctttcccctcatgtctgcaagtccaatctctacctctgcctctctattcttgccctggaaataggtttcaaatgtactttttaatagtgaatcatgataaattaaagccccgtatatacctctctcctcttaggaataagtattctgagctggagtttctcattccaatgcatgttttcagggcttgacgtgaggtaccatcccctcggagttgtgttgagtgtaaccccacagtagccctactctttcttatactttgatagcaaactttacatccatatatatatgataccatgttttgcatattttcctattttatgttgataccattataatgcatatatgactttacaacttgctgacattttgcagaatgcttttgacacataatatgttccatgttgatttcactttactgtattgtgttcctttgaattaatttaaaaccacttgggttactctctgctctgcaaattgacatctttctataacacccaaaatacttattacacattgacctcttgcaagttgactttgagtcttttctgtggacacatccatcaaaattattacctgttcaaatgtgttaataagcatgtcactaaattgttgttgttcagttgccaaatcatgtccaattctttgcaagcccacggactgtagcacaccaggcttcctgtccctcaccacctcccagagtttgcccaagttcaccattgaattggtgatgccatccaaccatctcatccttggtcaccctcttctccttctgccttcaatctttccaagcatcagtgtcttttctaatgagtcagctctaccatcaagtggtcaaagtattggaacttcgacatcagtccttccaaagagtattcagggttgatttcttttaagattgactggtttgatctccttgcagtccaagggactctacagagtcttcttcagcaccgcagtcaaaagcatcaattctttagcactttgccttcttcattgtccagctctcacatctgtatgtgactactggaaagaccatgtgaaagtgaaaatctcgtggtttgtctgactctttgcaactccagggactgtagcctgacaggcttctctgtccgtgaaatttaccaggccaggatactggagtgggtagctgttcccttctcgaggagatcttctcaacccaggaatcaaaccagggtctcctgcattgcaggtggattctttacgagctgagctaccagggaagccctagacgtcactatatggacctttgtcagcaaagtgatgtctttgctttttaacactctgtcgaggtttgtcatggctttcctgctaagaagcaatcgtcttctaatttcatgactgcagacaccatccacagagcttttagagcccaagaagaggaaatctgtcactgcttccacctcttccctttctatttgccatgaagtgatggggctgatgccattatcttagtttagggtttgttttttttttaatattgagttttaagccagctttttcactctctgcttttaccctcatcaagaggctctttagttcctgttcgctttctgccattagagtggtatcatccacatatctgaggttgttgacatttctcctggcagtcttgattccagcttgtaactcatccagactggcatttcacatgatgtgctctgcgtataagttaaataagcacatcactaagtgcttatgcttaaaaagtctttcaaactttctacggttgtcatttcaagagcattctcttgaaaggcatatttcttttcattagtccttgctaaaatctttactatctactaaattccttagaactccttagaacatgtaccttgttgaaccatgtacctctttgttgacctagcaagcctaggtcaatgtctgtcctaatagtaatgtaaattttatagcagcctgaaccttaattaatctaatcatctgctcactcagcaagtatttgtttagggaaaactagcaacattcagaaaattaagatcatgacgtctggtcccatcacttcatggaaaatagatagggaaacagtggaaacagtgtcagactttatttttttgggctccaaaatcactgcagatggtgattgcaggcatgaaattaaaagacgctttctccttggaaggaaagttatgaccaacctagatagcatattcaaaagcagagacattactttgccaacaaaggtctgtctagtcaaggctatggtttttcctgtggtcatgtatggatgtgagagttggactgtgaagaaagctgagtgctgaagaattgatgcttttgaactgtgttgttggagaagactcttgagagtcccttggactgcaaagagatccaaccagtccattctaaaggagatcagtactgggtattctttggaaggactgatgctaaagtggaaactccagtactttggccacctcatgtgaagagttgactcattggaaaagactctgatgctgggagggattgggggcaagaggagaaagagggtgacagaggatgagatggctggatggcatcaccgactcgatggacgtgagtttgagtgaactccgggagttggtgatggacaggaaggcctggcgtgctgcgattcatggggtctcaaagagtcggacacgactgagcgactgaactgaactgatggagcgagcactttatgagacactttaagaaacaaacaaacatccatcaattaaccttacgttcaaaaactagtaattatgaggttgggtgtagctggcctttttataatgcttttctatttgaaaaatgacttcacatttttatctccttggatggttagaaaaataggcaagcaggatgactactgtgattcttattatacaaatgaaaccctgagctttataaaccagaagcattttgaccaaggttaaacaactagaaagtgatagtcttaaaaagaaatcctaggtcatctgattcttaacccttcatgtgggaatctattaatagcaaggcaaagagttctcagtgaagcatctaaataataaagacataccctgttcctgactatagaagtacttaggctgggactgccaaattcatttaaagaaatcatgcaactctttgaaaaacaatgtgttaaactgaaaatagcaaaatagattcttttgtgctggtgtaatcatagattgtgccgaatcatagatttcagtattggctggtgctaacaacagctaaacttataaaaataaaatggattcattgccacctattttttccgccttgtttctgtaattgagaaaagtccactattatttggtcttggcacaccgtcctggcacaattggaggaactctgttcttggctaccacagttggcaagaaaaacaaacccgaacatagcctttgggtagaaacagggggtcgtatgctttgttttaccttcatttaaaaatgttagtttcttctaagaccagaggagtttcccagtggagaggctcaggcttatttgtcagtggttggagtccaggcagccttatcttttgtctttaaacaatacagggtggagtgggagccagaatgggtagcagaaatattctctggggccaaaccaataaaattctgctggaggccctgggcagaagaaagctctagcattgagtacttttgttttgttttgttttaaaaatcaactaaatactcctgaaaaggggagattacttttctaagtgcctttttagaaaattacccagcagattgtctctcacaaatagccgggtatgatccactgactggtatttaaatctaacgataattaccaattttagtttaaactctttgaaactataatattgtcagactttggatttcctttaaattcttagcctaaaaatcctaaatgtttcttatccttttcatttactagtcatgtcatagaaagaacggaaattgagttgctgaatctgcagtcattctgacctctctaaaatgatacaaactatgagttgcctgtggtattggcataataaagttaatctgcttttagttaaattacatacttaccactttttatctaactttttagttggaatactttcgaatttataggttataagaatattcacccatataccttttaatacagattcaattgtttttaacactttgcttcatttgctttataaatccttgctttctgtatgcacatatctaaaccccttgagtaagctgtatacaaaatgactgtttacccctaaatacttaagtgtgtgtttcctaagtattttctcttacataaccacagttgtccacttgagtaaatttagcagtaactaaaatacttcagtctgttggctgtatttcaatgttaccaaatttttctggcacgtttttcttctggtacaagatctaatctattatcacgatttgcattttaatactatgtatgatcagcagaataatggtcccccaaagatgtctcatgctgtgactatattacctttcatggcaaagagtctttgcagatttaattaaggatctgaggatgggtagggtatcctgggaatatccaggtggacccagtctaataacataaatccttatgagagggagtttaggaaccagagagaaggtgttacaccactggcttggaagatgaaggggccacaagccagggaatgtgggcgatccccgaaagctagaaaagacagggaaggagattcttctgtagagcctctagagagaacaccatgtaatctgtgatcactttgatttcagcctgttgttgttggtcactcagtcctgtctgactctttgcaactccatggactgcagcacgtcaggcctccctgtttttttaccatctcccggagcttgctcaaatccatgtccatgagtcagtgacgccatccaaccgtcttgtcagaatgcgcatcccaaggtgtgatgctacactaaggaatgatgtgtcctctagttatcactcccagaggcaccgtgtccatcttcttcccatggtgctgcttgttttaatctgctagttcaggtgtcccactattgctgtgtatttactcattaacaactaagcagcaatctttgggaagatacttgaagaccatgtgtatttcttcatcaaagtttctcttgtagattgatttttacatgaaccagtctttactgtcatgtcagtttttattttttttaaagtcaaggttaaacaaagaagtcattggcaatacattaggttattctaaaaacatggatcccagccatctctcctttacagcacccttcctcccttctggacgatttcactttctcaactattcatacccttttttgctggtctgccccctctgggtcttctcacatctcccccaccagtcaagggatttattacctgatatttcaactcttctttaaaagacagtggttcttcaaaacaaatacacctggtcattttatccctcctcttcatatactttgaatggttgcttttaggaaaagaagcttcttacacatggcctccaagactctggtgatctggcacctttccagattctttttcagtcctacagcctcacatgttccctgctgcccctgttcctttcctgcaagtctttctctgaacctagtgtgctggtcaatccttttctttagataactcctctttcattttcttttttatttcttctatgatttttcttaaaaaaatttttttttttgattgaagtatagttaattatttccaggagatagaggacagggaagcctggtgtgctgcagtccatgggtcgcaaagggtagaacacgacttagtgactgaacaacggtagttgatttataaatgttgtgtcaatctctgctatatagcaaaatgactcagttttatatatatatatatatatatatatatacacacacattctttaatatttttttccattatggctaattgagaatattggatatagttctttgtgctatacaataggaccttgttgtttatccattctacatgtagtaatttgcatctaccaaccccatattccctccccgtttcctggcaaccacaagtctgatcactatgcctgtgagtccgtttctgtttcgtagacaggttcacttgtgccgtattttagattccacttataagtgatgtcatgatacttgcctttctctttctcacttacttcacttggtgtgaagtttcatccatgtagctgcaaacggcactattttgttcttttttatgacttagtagtattccgttgtgtttatgtaccacatcttctttatccattcctctgttgatggagatttaggttgtttccctgttttggctattgtaaatagtactcctatgaacataggggtgcatgtatctttttgaattgtagttttgcccaggtatatgcccaggagtgggattgctaaagatcatacggtagcttgatttttagttttctgaggaacctccatactgttttctgcagaggctgcaccaatttacattcccaccgacagcataggagactttccttcactctgcaccctctctagcacttgttgtttgtctgacaaattcattttcaatttcacttctttaaggaagcctttactctccttgaggaagccataccctcatattagaaacttctaatagtactcctcagaatggtagtgcttttgtttatttgtgcaagtatttagttgtaatcttctatttacctataaactccctgagggcaggagttgtatattttgctcgtccatcctcacagtccaatatgtgactattgttgttcagttgctcaatggtgtctgactctgcaactgcatgaaattcagcacaccaggcttccctgtccatcactatctcctggagtttgctcagactcatttcctttgagtcagtgatgctatccaaccatctaatcctctgttatccccttctcctcatgtcctcaatccttcccagcatcagggtcttttctaatgaatgggcttttagcatcacatggccaaagtattggagcttcagcatcaatccttccaatgaatattcagggttgatttcctttatggttgactgatttgatctccttgctacccatgggactcttaagaatcttctccagtaccacagtttgaaagcatcatttcttcagccttgtttatggttcaactctcacatccttacatgaccactggaaaaaccatagctttgactccacagaactttgtttgcaaagtgatatctctgctttttcatatgctgtctaggtttgtcataacttctcttccaaggagcaagggtcttttaattttgtggctgcagtcaccatctgcagtgatttaggcacccaagaaaacaaaatctgctactgtttccactatttccccatctatttgccatgaagtgatggaaccagataccatgatcttagttttttgaatgttgagttttaagtcatcattgttactctcctctttcaccttcatcagaggctctttagttcctcttagctttccaccgttagactggtatcatctgcatatctgacgttgttgatatttctcctggcaatctggattccagcttttgagtcatcctgccctgcatttcacctctgcatataagttaaataagcagggtgacattacacagtgttgacatacttctttcccaattttgaaccagtcctttgttccatgtttggttctaactgttgtttcttgacctgcattcaggattctcaggaggcaggtaaggtggtctggtattcccatctcttgaagaatttcccacagttttttgtgatccacagagtcaaaggctttagcgcagtcaatgaatcagatgttttttttttaattcccttgctttttctatgttccaagtagatgttggcagtttactgtctggcccgtctaccttttctaaatccagctcatacatgtggaagttcttttaagcataatcttgctagcatgtgaaatgagcacaattgtataatggtttgaacattctttggcattggaatgaaaattgaccttttccagccctgtggccactgctgaatgttccagatttgcagcatcatcttttaggatttgaaatagctcagctagaattccatcacctccactagctttgttcattgtaatgcttcctaagacccacttgactttgcactccaggatgtctggctctaggtgagtgaccacaccatcatagttttatctggttcattaagatcttttttgtacaattcttctgtgtattcttgccacctcttaatttcttctgcttcttttaggtccttaacatttctgtcctttatttttcccatctttgcatgaaatgttcccttgagatctccaactttcttgaagagatttctagttttccctgttctgttgttttcctctatttctttgcattgttcaacttaagaaggctttcttgtatctcctcactattctctggaactctgcattcagttgagtatgtctttccctttctcctttgcctttcatttcttttgtcagctatttgtaaggcttcctcagacagtcgttttgccttcttgcatttctttttcttggagatggttttggtcaccatctcctgtacagtgttaggaacctccatccatagttcttcaggcactctgtctatcagatctaatcccatgaatctatttgtcacttcctctgtaaatgataagggatttgatttagatcatttttgaatgacctagtggttttctctattttcttcaatttaagtctggatgttacaataaggagctcatgatctgagccatagtcagctctaggccttatttttgcagactatatagagcttctccatcttcagctgcaaataacataatccatctgatttcagtatcgatcatctggtggtgtccacgtgtagagtcatctcttgtattgttggaagagggtgtttgctatgaccagtgtatcctcttggcaaaactgttagcatttgccctgcttcttttgtactcagtgtatgataggcgcttatgtgctgaaagtgaagatggaaggaaggagggaagttctctcacacgtaatcccttgtaatttccgtgaggtgccagttgaatagaatctgtaagattatgacgatgcggtgaatgactgtaacttatcacacagtatttgcaccttagggttttacccatcttcttttagatatgtatgcattttgtaaaaaggtttaggtctaagagtaatatcatgctattttgaggaagcttgatttccgtaagccttctgttatgctactactttaaattgagtcatttctttaatcaagaactttctcatagttctcagtgattgaaggctgaaagccagattcctgagtctgatgttcataagcttccataataaccttcctgccccacgccaaccacctcatcttaatgcccattattttgcaacacaaattcgtcacccagtcaggtgagtcccaccctccaagaatcaccttgaagtgaaagtgttagttgctcagtcttgtccgactgtttgtaaccctattagcctgccaggctcctctgtccatggaattctccaggtaagcatactggagtgggttgccattctcttctattctcagttccaagacagcatgatacagcttccctttgctaggaatattctttcctctcccacccactcatccaaattctatccacagaattatgcagtatcctgagactgaatgcatcttagaggtcagcatttccaaggtcagcttaagatccctatttctcataagaccatttcctactgtcccagaccatgctctcttccctgtatcattggccagtaaaaactgacagcacccctaatctgtgcttgtgtgggacaaagtgatgagcaatactgatgaggtatctgttctgtggaccttatctgttactttattatctctgaatttctatagaatttgtctcgaaactaatcattttgggtagttgatcatacattgcttacaaagctatttaaaattgtatgtgttacggatctctcatagtattgttgtgagaaatgattaagatgtgaaaaacccaagatatagtgtacatgcaataattgttctgtgtcctcacgattattttgttgttatattttctctttttactgtatttatctaaagattagggatctacccttttaccctgttgtatttccttaccatttgagcaggtagtagctactcaaaagctgctgctgctgctaagtcacttcagtcatgtccgactctgtgcgaccccagagacagcagcccaccaggctcccccatccctgggattctccaggcaagaacactggagtgggttgccattttcttctccaatgcatgaaagtgaaaagtgaaagtgaagttgctcagtcgtgtccgactcttagcgaccccatggactacagcccaccaagctccttcatccatgggattttccaggcaagagtactggaggggggtgccattcccttctccaactcaaaagctacttaccattaaacatttaactgctggccaaaaaatgtctgatttacaaatcttgagggagcctaccttatttgtttagattcctttggttcttactaacagtaatgaactcaagcttcaccaaaaaaaaaaaaaaaaaggtcccattactgtaaggatactgaagaatagcatttcaagtcaaggggagggatgcagccaggcctcatgaagggactcgaaccaggactggaaagcctccaggttttcctttccgcttctctgcatctctgcctggtactgtttcaccagtgtagatttttttgtgtgttttcagtcacctgatagcgtaatagctgccccagagctcccacacttacatattacagtttgaccctgctcagagactggttatcagttcttatcactactaccttttgcggggagggactttccaattgacccatttgtctcaggatgccacgttgtccagtcagctgtggctgctgggcaaggccattgtttgtaattgtggatcccgaggacccacccctgtgatctgaaatgcttcctatagaaatggaagtcagtcaggtagacactgtacttgtctacttctagctcttatataatatttctttcaaaggaataagtataaaatgttaggtaaatgaataaaatgtaacattaaatactattttttaggtggctctttccctggcggctcagcggataaagcatctgcctgcaatgcaggagacccgggttcgatccctgggttgggaagatcccctggagaaggaaatggcaacccactccagtattcttgcctggagaatcccatggacagaggagcctggcgggctatagtccatggggtcgcaaagagtcagacatgactgagcaacctcactttcactttcactttgtatactcaaactacagggcccatcttaataagtaagtgattacattaagatactttcagaacatctagaccattactacctgaaaaaaatagcatagaagccacacgttgttaagttgctcagtcgtgtctgactcttgcgaccccatggactatagcccaccaggctcctttctctgtgggatttccaaagatgaactggagtggattgccatttcctcctctaagggttcttcctgacccaaggatcaaatccgtgtcagctgagatcttggcaggcagattctttaccacagagccacctgggaagcccagaagccacatatgtaatgttaaattgtccagtagctacattaaaaaaaaagaagaacatgaaaaattgtaataaagtttattagtctaatatattcaaaatattatcactgtaccttgtaaaccatataaaattatcaacatattttaatttttaatatttattcagaatccactgtgtatttcatatctatagtacactccagttcaaacactaaattttcatcagaaatatttactcatttagacttttataaaattgacagttgaaaacacagattcacatacctaagcttttccgaagattcttaaaagtgttccagtcaccaaatcgtgtaatgattttctaactttcagcatgttgaattagttaagcaaacttaatattttagttcctcagtcatactggccacattttgagtgatgagtagctgaaggtggctaatggtccctctattggctcacccagactagacagagatattttagagacagagaaagtgatgctctgaatagatttaagtgacttgcctaaaatcacaaagtgtgttagcagagttaggactagactcagcccctagttcatcagggctgccctcatctcccgcgttcttcctggtgctattttgtatctggctcagaggccatttataggcctgcctggggaaacaacatgtatttatagtgtttggactgattaccatcttaatcagatggaggtttctactcgccttaattaaagcaagaaaatgcagttagatgtctgcagcgaacactgaagacccaaattaattgtttagagagaggactaaaataaatcatgacaaaacccagctcaaaaaaggacttaagattttggagactctacagcagtaacttgagcacacaatattttacgaagtgtttttgtaggaatgttttaaatctgccttgccaatgttcgagattggcaaggagtgtctgctttctagtcctaagagtaaaaaccagaaggagtaaggaaagtccactaaagtcaattggtggggatggtttagttgctaagttgtgtccaactcttgtgagcccatggtctgtagcccacccaggctcctttgcccatgggatttcccaggcaagaatactaaagtgggttgctattcctttctccaggggatcttcctgatctaaggatccaaccttggtctcctgcattgcaggtggattctttacctgctgagccaccagggaagcccactaatagcaattagcatttgctatttggttgcaacagttctggaagaaatctggttcctataatatagttctggattcactgaaatgagacagagccatttctaattcctaagtactgagtttaatgaccagtgtgtcttgtccggaagtgggaccacatgagtcatggagaacccagcagaagaaagtgctgcagctgcatgtgttttgactgtatttactgatgaaaaaaccaggcaagtgcttgggagtcttggtttctagtatttgttttaaatttgttgtgtaaccttggtaaaccacttcactgctcgagaccttccttgattttcccatttatgaaattggtgggactggaccagatggtcttttagcatttcttccagatctaaaccgttgtgattctagtggcaaagtgctagattttttttgactgaccagcccaggaggtaaatgctggaagcacaagaggaaagaaaggggtgctttgtgcctgtgggcattcatacttctaattctggcaagattgaaggttgacacacattaaagaaagcaaaacagaaacaatcaaactgggcggtaatgctggtaattagattagttggattagaagatggggtagaagactcattgtgaatattcctcagaagcctcatagtttatgagccagggctttgctccctcagaatctctaatggatgttttaccccagctgctttgtggagaattcctcacagtgtacatacctccatgaggcttcctgacgaagcagacacatatctctcaaagaacagttgctaaatggaaacgcagtgccaagtacctctgtgaagaaacattagtgtgtgttttttccactttcagattctagttccaaaaggcttctggactgctcttggagactcttcatctaagacagatgcagaatcctgtgtcaaatgttttcagctaataaaccagcacagtttcttaaacgaagcaggggatggagagaagaaggcaggccagatttagcaagtctctcggatgtttttattttggccatggtctcaaatttaccagttctaggtctgcagagatattatatcacacatcctgtgacatccacgtatcatctaatttatatttgtgtgaatgtgtgagttttcattgttgggttttggaaatggtcatattcttaattatgtttagaatgctttcaatcatagttgttttttttttaatcttattaatttggtgcttatggtactttaaaatccttaggaagttcatagtttttacccagatcttctgtggtggtggcatgccagcaggtcaaggacattgattcaatgtcatcgatttagttagcattctagaatgacacatgttatatatcatttatatatacacacacaaacatgaatgaaagcatatgttgctccaataatcctaaatagagctgttataattgatccagaaaatgtaacaggctaccaaaaaagaaggtaagaaattaagagtatgaagttaaggaaaatccagacaggttttcccttttaaagcaaaaaactatatttctttttgtgtgtatatgggtgaataaaacattacattatatgtactttaggaatttgaaacatactctgtacatcacctctttgatatcctgtctgactctatcaactttactgatctttcagattcttctagtgaaatagagaacattatttatatcttccattcttctaatatatattgtgagttaatagctgtgcaaataaaactatttgtttaaaatggtctctgaaagatgagagacaataatgcctgtttattaaggtaaaggaaaaacttaaatttgtgaattgcacacctaattatctatttcctaatcataataatcttgtaagagttgaaaaacagactttgtatcatctcacaaatgaaatatttaggtcactgtgttttgctgtctacaaatcattgactagatttaattaaaaagaaaatgcaaaactgcttgatgttctagtcaaggctggtttcctttcttgtaggcggacaagttaaaactggctgatatttaatattgtttacctcagttttatctttcctaaattcaataaactttaaaagctaaaatatagctgtttaaacagattagtgaaaagaaatagctttgaattgattatatagtctttcgaagaaaattatgcaagagtgtataataaatgaaatacagttaaaggtgtttagaaatatatttttcagcagtgtagtctcaatgtttatgtcaaataccaatgaatttttcataaccttaaaggggcaggtattaggctaggattcgattatgggatttccatgatttaacagtaagaaattacaggtttagggttgaaaatgtttctgggaaaagttgattgcttggactgttgatgaggtatgtgaaaacaagggtgggtggccatggggcgagtagtcatagctaaataagaacttgaatgaggaatgtaaacatagagttcagttgaagatagagataaacagaagtgacagtaagcaccccagagttctccatttaaaactaagaaacatataaacaagctcctttctgctttaaccacaaaaaagcaacaaacaaacaaaaaaccaaaagaaaaaacaacctgttcatttaacgcaaagaccacagtacgttaattcagaataggggaatttgattttggttcctacacatcagaggatcagagagaaggacaggcgagcttattcataaagtggagcaaggacagagtttgaaaagattagtacatgagctgtacttgccatggaaaaatttgcacaatttcagtgggatgaactaactggtgaaggctattctaccatataaatactagtaaagtggtatttacagaatgtgctgttttccatatcctaggaaatctgccccttgctgatagggataactatctaaagggaattattgctgtctgaatggagggaaacttgggtgagcagtcagcctccaaagaaagactgacagcttgtaaagagacttgttaatgatgcaaatatgaactggcatgtgcttaagataagcactgattttataaaacaaagagttcattctcagcatattttggaaacacttagtctttgagagcttggttggtgagtccaatgaaatggccaattgaactaattcccactaggagtttgtttattctacttatctgaagccagagccaacactccctaaaagttttgaatggcatttaatgcttccagaaattgcaatgtacctatctgtagagaaaccagtttccctttggctgggtcatattaattaaaattgttctatgaaataaatataaaatggctttcttgtataatttagaaaacatgaattacatgacttcctccacagagatattctgctggtaagtagaaaaataaactatagtgggttttattcattttacatggcatcggttaccctctctgacaatgtacatttatcacaatagaaataatttaaaattatgtgagatcttgataagccaagaccattttacctttgtctaatatctcttatttttttcattataacattttaacagttaaaaatataaatcagaacctagacttcaaagttctttataagagaaaagagaatattacaatatacaaagtatgtaaatttccaattattttaagtggtgtcacatttaatttctaaaaatgttatgattcgttctaatatactaagaagttttccctaataatctaaacctttatttatctgcaaatgtataagaggggttggcaaactacactctatagaccagatccaatattttgctgatattacatgtacagctagctgagtttgtctttttacagatgaacatttacagtctacttgataatagagaatgcttttaaccctaagtgaacaaaaatgttgacccaataaagaattccattcttcttattgctaaacctgtgttacaaaagaagctaaattattaattatgcaaaagaagttatatctaattataatcattactttttaaatggtaataagaatgggtaaaaattcattttctcttgtgtaactggacctacacaatattcttgatttttgcctcttggcatacaaagcttgaaaatatttgccatctagccctttccagaaaatgttgggacccctgttatgtagtattttttctcactttttttttttttcacttctatatcagttaagcaattagtttctgagcaacacccatatgccagacactattctaggtctcaggaacaccacaggaaacacaattttataaaaatcctaccctcttgaaacgtacattcaaattatgtacctcatcgcctcaaaactaccttacttccattattccctttctacagaggggcaaaatgaggttcagagaatttatgtagcttgttgggattctctcagccagaactgaacccagttttgcttgattccaaggcttgcgcttctaaccagtgggcagggctggcttcatgagtggggctccacgctcggcttcatgctctgctgtcaccatcgtgaaacacttcatcattttttgaacacgttttgaacagtaaatacatttccattttgctattagccccacaaattatgtagctggtcctgccactaaagcaaaagtgcttctctcccagatcatgttctgccagggcttttttttttttttttaaacacccacagaaactcagctatgtagaagctttgaaatcgattaagatcttgagaaaaataagctattattgatcctctgattcatattctagttccccaaaagactggaagttccttgaagaacataggaacctttcccactgtaactttttaaaaaaatttctctgggttaaattcctttcagaatacagtaagtaagaaataaatgtgcttccatagaattaaattttgcagtatctgaaccttgtcaagggctcagtcttaattttatctccatggaagggcaaaatctttaccatcaacaatttcttctgatctttatgcatttggaaattttgaaacagctgtgagatatgacttaaataaaacctaagaatgaacctgttctgacataaggaaatcatttgtccagtaatcagtgactgtacttaaaacaggtgctttgtcttttcttttaatttcttacagcctagtcattgttggataagcgagatggtggaacaactgtcagtcagcttgactgatcttctggacaagttttcaaatatttctgaaggcttgagtaattattctatcatagacaaacttgtgaaaatagttgatgaccttgtggagtgcatggaagaacactcatttgaggtaactttgtattgggactgctttttattactcatctctgtaacctatagctgattagtggtggcagggctggggacgtgtttgtgagatttttaatttataaatttgtaattaaaaaaattttgaagatgagcacagaaaataaatgtttgtagttatatcacaactgaaatgtatattaagacaattaaatgttgtcacttaatatacaaataaatgtattcacagtacacttatgaaaacaaacctgactttatctcgtggataaggttctcatagccttcctatgaggttgccaatgttcatttacctttaagtggaaagttgcctatagtgaacacttgacctcttatctatagtaataacatcacaacaaagaagtgcattttaatgtctttgggtcatttgatgattagttgtcacttcagagtatgggtatggcagtgctttgggttcaaagcatattaaagaagcaatgtacccactagagatcaagaatgggatgctggaggtcaaaacctggctttgttcagtaatagttttgctcactttctttacacataaaatggggacaaagaagagttgatattacatgattaatgatgaatttttattcatcattatgaaggaatttttatcattcaaatttggcaaagtaaaatgttaacagttttttaaaattttataacactgtgtctatataataaatgacctcttgggacacatgttttggcatagagttcacaagccaaggtttacaggccttcttgaagttcagacctaaggctttaaccatgatactctatagtaacagtcaaatactctgtctccattcaaattccagtcactatctaagacccaacctctacgtgctctccaatcttaaaattctcataattccagtcacctaatcactataattcatcatttctactgttttattttctaatttcccaatcagaatgtatcttataatcaatgacatcttagagttagcatccctttttatcatatcagtatgaatgatgtactaatggcaatgataaggagaggtcacaaaaagtagagtataccagacaaggtgtcatgaagaaaataagatatgccctagggcctgaaagatgaattaattggtcaataaatggcaatttatctagaagagcattccagataccaaaaagtatacatttactaaccatggcactttggctagaacccaagagattcataccaggtggtatctctcagttgtttcagaggttaacatatataaaacactcagagtagtacatagtaagtggtacataggtattaactctaattatcattacctgcttttatttatagatgactatgtttgagaagatccccttgagaagggaaaggctacccactccagtattctgtcctggagaattccatggactgtatagtccatggggtcacaaagacacaactgagcaacttttacttttcatatatttatgaattcctaaaatatagctttgacttgtttggggattttatagaaaatcatactctttttatgcttttgagacttgcttctttcactccacattataagatatccccattgattattaaagctatagttgatttttttttgtttttttttacacactatgagagtgctggttgctcagtcgtgtctgactctttgtgaccccatggactgtagcccaccaggcttctatgaccatggaattctggattcagaatactggaatgggtagccattcccttcttcaggggatcttccaaaaccagggattgaactcaggcctcccacactgcaggcagattctttcccatcagggccaccagggaagccccactttgagagtaaatgtgctatgaaaaatcagggacatcttcttagaaaaggtgactcttcatttgagtttacagagagaatcaaagttgcctagaaagatgaagcagcaaggaaccacaggcaaagacaggagcagaggtgcagagaacgaaaagggtgggacgtatggggatatttgtgattccatatgctcagatgccaagtgagtgtggaagatggttgtagaggaggtgaacaagggcacagaggccaattagcatggacttaaatccctactggcaaatcaggaagggaaattatatatgtgtatatagggagactgtaaatgcttaaagtaaactcattgaggaaattccccagtgggttaatggttaagatcctgtgcgttcactgccaagggcccaggttcaatgcctagtcaggtgactaaaatgccgcaacctgtgctgctgttgctgctgccaagtcgcttcagtcgtgtccgactctgtgagaccccatagacggcagcccaccaggctcccccgtccctgggattctccagacaagaacactggagtgggttgccgtttccttctccagtgcatgaaagtgaaaagtgaaagtgaagtcactcagtcgtgcccgactgttagcgacctcatggactgcagcctaccaggctcctccgtccatgggattttccagacaagagaactggagtggggtgccattgccttctcctgtgcagtgcagccaaataatgaaaacaaaaaataaattcattgatgtagaatgtaccttctctgaggacatagcgttctgtgtatatctctaaattcacagcatattataattgtctccccaacaagagtgtgagctctccaccgaaaaagactctctcttgttcaggttttttttttttaatataaatttatttattttaattggaggctaattacttacttgttcaagtttataacacagtacctggcacagaagcgttctatcacagagaatgattttttaattgcatgaatggagaatgaagcaacgcctgagttctaatcccatatctgcctcttactcaagacatgcttttaacaaatcagtctccttctctaaatctgaatttcctcatccatttttcttaactgtatcccagggagagacgctctatgcaaaataacaaaacagagagtggagaatactgagaaatcttcaggctatattctgctcttagaagcaaaatgcacatttccagaacaaaccaatagggacttccctggtggtccagtggttaagatttcgcctcccaatctagggcatgccagttcaatccctggttagggagctgagatcccacatgcctctcagtcaaaaaatgtaaaacaggaaaaatattgcaacaaattcaataaaaactttaaaaatggtccacattaaaaaaaaaacaaaaacttgaaaacaaaaaagtccaggagtgagaaaatcagtttgactttgttttttttttttttaatttaaatttatttattttaattggatgctcattgctttacaatattgtattggttttgccatatatcaacatgaatccaccacgggtgtacacgtgttccccatcctgaaccccccttcccacctccctccccttaccatcactctgggtcatctcagtgcaccagccccgagcatcctgtatcctgcatcaaacctagactggtgattcgtttcttatataatattatacatgttttaatgccattctcccaaatcatcccaccctctccctctcccagagagtccaaaagactttttctactgttcataaacagttcattgattcaatatgccactgtttattaaaccactctcctgttgattggtgtaagaatttataaacactgctggcaagaactttcttaatatgcctcctggtacatcttgcaagagtttccttaaagcagttacctaggagtggaatttctgggtcacaggatgggcgcatgtccaaccttactaatatcaaagtgccaatttatgtcattccactggtatataagagacctgctctgctccaggtccttgacactatttatcatcattagccttcttaattagtgcatatttggagcatgtgtgtatatatattttaatgagaagtaatgattttaatgaacatctttaaagagaacagtctataatttgttaggattatttcattgttttgacgttgctttcaccttactcactctcaccaccaccctcttccttttatccagaattgagcaccagactgaactgcatagaatcatttgtcctatagtgccagtttgaattatgagttttaaaacagttgtctagagacttccctggtgacccagtgggttaagactctgggcttccactgcagggggcagaggtttgatccctggttggggaactagattttgcatgctctgtggagaggcaaaaaaaaatactttaaaaatctaattcaaatttaactcaatggatatgttcctaaaatattaacaatgttacttaaaaaaaaaacaaaaaacagttgtctaacagtgtccgtttcacttgagtctgtcaaggacatatttgtggtctattattttgacattaattaaatctgcagactatttgaaaaacctaatcttcttcttcttcttctagaatgtaaaaaaatcatctaagagcccagaacccaggcagtttactcctgagaaattctttggaatttttaataaatccatcgatgccttcaaggacttggaggtagtggcttctaaaatgagtgaatgtgtgatttcctcaacatcaagtcctgaaaaaggtaagacatataagcattcctaatataaatgtaaaaagtaagagtgaatcatatgtgtaggtaagaatctacctctgactcaaatatatatgtagctagaaaaagacatgtgtgtgtgtgtatgtctaatataaaagcaaatatcagtggcatgaaaaaaaaaaaaacagttatatacttgttggtgttcaagcccaaacaacacttaaccatcttcaaagtacagaattgcgcatgagtaaatgatctatgagatagtcactcattttcacctgatatttattagtaatatacaattatattcttcttcactttcagtcttcttaatgtccccttctcaaatcttttccctaagggtctaactctgagttatgaactctcatcttcaccacttaccctgtattgaaacttcctccccgctatcatccctgtgatacgaaattttaatttcattacttattttgaaaaagtgaccaatttccaaccatttgcattagttacatttattagcatgtgtaggcagtgaatctttgttctgtaaggtgactttggtgaatttcttaataagaatagcaggacccggtatagaataaataggatctgaataatcaagatttgggaagcaggcctggaaagtactctaatattgcacttcaccttttgaggactctttaatttatgtaaatcgccatgcaacactgacgcattattgctttctatttagattccagagtcagtgtcacaaaaccatttatgttaccccctgttgcagccagctcccttaggaatgacagcagtagcagtaatagtaagtacatatatctgatttaatgcatgcatggctccaattagcttctgttaggagtattgcatgagctttaaaggaaatttctacagtcattactattaattctgttctcttactattcttcctgttatgattttcctgaaaattaaataattaggtttgcacaattggttccctaaagctggagataatgtttaattggggtaataaattttctgccaagatagttttcaataaggcatgaaattacttttagatgatttaagcttttttcattgttgacttgaaatatattttgcatggaatttgcctgacaaaaaatggaattttaaaatggaaaatacaagtgctggctgtgtaaaattccaaggatatcttctgttttgttgtatataacactatttattactgtatgtttagaaatttgattttttttattttactataaaattatatgttgggggacaatatgcttctttctctgaaatttctatccttgttcgagaagaagaatccagtttcctagaagtcaaatgtccttttttctttcaaatgtaatcccatggacagaggagcctggagagctacagtccatggggtcgcaagagtcggacacaactgacagactaaacttacctacctaggcaaaagtcactagaagggtcattggatttgctaaatattctgaccctctagtctcatggatgctgtaggaggaaaacattcatcctgtgatcttagctgagaaggtcatctcttaaaagttagtaatgggacactctcatatattcaagagcatcaaagacctatccttaaaaaagagtaacaatttaatacaaatccacaatagcaatgcttcaattcagaaactaaaaggaaaacctctaaaatcaatctgttttggacgtttgccaccaaaacctgacctgaattgtgacgaggctatttgtaatctttaccctctaaaagtgggtatgtctttcactaaggcatgcctttcactaagaaatattaatgtgtttgactatagggtgctactcatactcactgaggatattatataatatacaatatttataggacagaaatattctcagatctaaaattctgaatacccattggattcgaaaaatttgaagatactatatatgttaaggtctttcttactaagaattttattaatcttttcaaagaagcagtttttgacttttaaaattgttagtacttcattgatttataatcttacctttcataatttccctacgtctgccttgggtttaatttgttcaactttttctaacttcttaagttctcaaggtagaaaaattagatcattgactctaaaccattcttcttttctaaaataagcacttaaacgtataaatgtccttataagcagctttagctgaattccacatattttgatatattgtgttcctattatcatttctttaaaaataattttccttatgatttcttttgttcatgggaatataaaagtgggtggtttgttgtctaaaactatgtgatttttctagatatcttattaatggtttctaaattaactccattattgtcagagaacatacagtgtagtcttgtgaaatttattgagacattttgtgaatattaaagtttcaggtgtagcatcctgaaatttgatacaagtggttgataaagttcagatcttctgtccttgttacattttttgtcaaatttttaattgtttactaagaggggagcattaaaaatcttttcttttgattgtggatttgattatttcttgttttggtatggtttctgctttacctacttagcagctctaactaagtacttatatatttattattgttatacctttcctaattgacttttacttcttgctgaaatattccttattaactctgctagagctcttgtcttaaagcatattttgtttgaccttggtagagccagcctttcttatatttactggtttcatatatattgtttttcttcttgtctttgttttgaaagtatatctctgatgggatgcagttgggccctgctattttatctagtcccttattttcattaattaggctgtttcacccgttttgtatttaatacggttatcggtgtggttagatgtgggtctaccatttcgttactggcgccacatgcttgctggtcctctgttcctcctttcccaccctcttttgtgttcattgattgattgacttttagtgctccattttaattactctgttgtcttcaacagcacctcttgacatcattttgtggttgctttaggaattaccatatacatcttaacttgtaacattctatttaatgttgtagcacttcagtaacagtgtaagaaccttgcatcagaagactttcacttgcctataacctcttttgtgctgttgacatatgtatttatgcaggttacaaacctcacaatacagtcttaaaattattgcttaaaaccatcttttaaagagaaggaaagaaattcttctacatttacccacatatttattatttcttgttactcctcatttcctcttgtaaatccaagtttctgtctagcgttaattcctttctggctgaagagcttcctttagcgtttcttgtagtgcaggtctgttgccaacaaattctttttcttttaatagaaaaatgactttgtcttcagtaatgcaggtgttttatactaggtacggaattctgggttaacagaatttttttccttgagtcctttaaagatgtcactccattgtcttcctgcttctgttgtttctgacaaaaaggcagccagcatttatatgatgttgtcccttatatgtactgagtcattttccccctctgcctttcaaaatttacttctgttttaggagtttaaataagatgcatttaggagtggttttcttgtttgtcaagcttcttggatatgttaagtttaaggatcacacatacgtacaatcacacacataatccacatatattattgataaaatcagtctcacagatcatggacattttgttcattttttttccaacctccctttaatcttcaagatgaatgatttcaacgtattttcaagttccctgacttctgtcgtctgctaaattttttcttccagtaagttttcctttttctattaatattttttattaagactttatttttagagcagtttaaggtttacagcaaaattgaggggcataggcagaggttttccgcatacttcctaccacacatgcatagcctctctcattatcagcatcccccactagagtggtgatttgtacagtggaggaatcttcatggacacctcatatcacccaaagtccacagtttacatagggctcactcttgtgctatccattctaagggtttgaatccagtgcatttttctcatttctaaatttgtactttgtgttctagaattttcatttgattctttttatattttatatttttctgctgagattttccatctgcatattcactatgacaatatttctattttggctcttggatgtagttacaatagcttctctaaagttcttgttttcaaatttcaatatgtaggccatcccagcatggtttctattaactgattttgtttttcttcctgattgtgagtcacatcttcctttagatggctaatttttgaccatatgctggatattttaggtattatgttgttgaatatctggattttgtagcattccttcagtgactgttttgttctgataggaagttagttcagttcctagcagatcagctttctcttccttcctaggcattttttttttttttaagctttcttagagggtggagggagagtagcgttatttctaaagcatgaggtcactgagctatttcttgaatgcctagaaaatctctccattcttgcttgtcagaacttctttgtctctgaattgactgctatggtctttaagtcatagcttcttggacactgtttattgccagattttgtgaagtttctcattgtgcatgtacagcttattattcaaccaatgattgagtctcctccagacacttatagcacttcttttctacacagttcctctccccaaaataaccctgccttacaaacctcacaaacagccctgcctccagctaaggcagcagccctaagcttcattctctgatttcctattgcagtgagactactaagtcaaaaggtgtcacccagccagcaaatcaggacagttgtgggtcttatcacttgcattttccctctcccagggattacactctcgcattgcctttcggccaaggtctgaaatagttgcctagtataatttgtttagtatgataagtatttacgttgggaaggttaaattgctatcatcaggattgaatgcaaaatcttttctacttacaagacaactgaatataaaacacctgtttggtcctatacctttgagactttgggtagtttttaaatggcaatatgaatgaccagacttgttttttgtttcccttttgctccctttcttctttttttgtaaaaaaaaaaaaaaaaagtggctcttgcatgatcagcagcttttggccaggtgttctcactcatgaaaatggcacttatagatacccatggataggaccaggtattatggagtatacagtctcataagagaagcagacacaaatacaaatatttatattttatgttatttatactgtatttaacagaagtatgtaaatgtctttagttgtagcataaggaaaggaaggcgttttggggagtacggtcagggaaatttgaagaaaccatgctgttttcagggataagaccccaaatgttgtcatgctggtcagaggacgtggcataagatggagcagcccagagatgtaagtgccctctctgtagcttataagggagaatcatgggataaggtaaaagtgttaaagttatccaaagggatttgtgctttcaaagtaatggtaatattctttgtaccaacctaaagtgtgttttaaaaatgtttaagtttgcgatccttacagacagtatatttaaatgatagagagaagatccttactttgacattaccttacacatcttctagaaagaccactgcccagctctagcccttgcttggctagctgtgtgatcttgggcaagtgttttaatcgctctggactcctcagtcaaatggaggttgataatctttccttcataagttttctatgagttttaaatgagttagcacgtgtgtacttcacaccgtgcctgatgtatagtacatgttcatcaagaattattagaacaattagaggagcgaggctgggtcagtaagtggtgagcctgtggtgagctctgaatcaagggagagtactgagttgcatgttttctaaggaccgagaagagagacatattcctgggcatggtgcccataaggagactccctctacaaagaaattcagcagaactgtagcacaggtttttgtggtctgtgtttgtacagatgtctggcattattagtcaaaccacacaagtcagttcccaccaattttgaacaccggacagttttcataataatgagaacagctaataagaactcaggaattcaggattactcaaatcctgtccagatgagcttccccacccccatagacttagaggcatttttatataaaagcaatgctttggacccaatagccttcatgtatgcttcccaggtggcactagtggaaaataatgccccttccaatgcaggagacagacagtttcgatccctgggttgggaaagtccccctggagtaggaaatggcaatccactctagtattcttgcctggagaattccatggacagaggagcctggtgggctacagtccatggggtcgcaagggtcagacacaattgaagtgacttagcacacatgcacacccttcatttggctcttgaggcacataattcagttctcattgacccctgatagatagcagctgtagcaagtattgggaatcatgccttggaggtgtaagcaaagccttttctaataaagtagattttctctcctggaagagggatggcaggatcactgaagagaactcaaggcctagctgtgaagccatttacattaagagaagaaataaggaagggacacctgtagaaggtgaagtcagctccggtggatctgaccacctcctatctccttttctgtctcatacaggaggactggtgctaggtgttagtcaaattccagaactttgttcaaggccagagtcctaggggtaggactttggttaacaagtcacagtgttctgggagagaggtgtacttcctttagtctctcctccagcttggctttatttgcaacacctcccctgggggctgtcctcctagctgagaaagatttagagtggggaatcccagagcacctcactctgtaataagttccttcggcttactgctggtgggtatggtctttcctctggtctgagtaatagcaattcaagatttggcctttggatagaacaggaagagcagatatctagctgccttgactctggggcatctggctgctcaaacataggtaacggagttctccgtagcaccatccccactagttttccactggagtctggggacaaaatattcatagcttcctttgttctctatgtctggatgtgtcacttggccaaatcatgatcatatgccagcaatcaaaatagacagtgtgggccatagtgggctggccatcaatgggaattcgaacatgtcactggaatacaaacacaaatacccaaattattatttaccgatagtgatacaaacatttctaaaatggtcagaattgcctgtaactccaaacacatttcctcatagaaatcacttttataaatagtagctcatgtaatcttatataacccttaaaatcattgtattattgtaataatagtgttacttcagttatgccaaatcccattttataactcaggcttattttggtgatagaattcatgttgagctttaagatgcctaaaacatatttcccatggggttggctaaaatatctgtcagtctggtcttaggaagtgattcatagttacatgaatggaagagtccacttcttcactcaatctcctttcagtataaggggtaccatgcctcactatgtttcctctacgctgcccaaacacacacccaaactttctattatgagaacctctttggaaacctaagaatcgtagaattaatgagtttcctgttccaagtttacaaatggtagggaaatgggcaattcctattctcactacagcagataagatttgtttcttgcatctcaggttaaatctgtgagttaacttttccctcttaaatgctgatatacatccagtggcttgattcttttagatcatgtactttaggtagttaatattaaataggtgactgtaggctgacacagtaacccaagtatcactgcaaaatatcatagcccaaatcagtcacttttactgaattggcttacattttgatcatatgatggctgaaagtatataatttataactgtattacatcttccaaagagaactgaaagtttaactcttacgagttgacacacatgtgtccatgttctcaaacaaggaagttgtttcttgtaaggagacagagaggaaaaatctgtcaaaatgttaagttttgtgatgggagcaagagtcccttagaggagttttgttgtttaattcctgaatcattctgcttctcaaggaagatcaaagcaggatgcagggaggtgtcccaagttgatttcctgtgcaggctctctctctcacttagttatatggggagacactggtgtttctaacatagaaagcctgaaaaattgaaacctttagtccatagcacagtgcaaagcactgctcagtatccagtaaatgccaactgacgatgcaatgaagagacaccacaattctaagcttgaggtccctgaaaatacccgaagcataatgtgcagatattaacttaaaatttgaggcaggccagacatagcttgatgcattgagaccttgatcgggatgcagaatgtcatctttaacctttcttggcaagaggtgatgtgtaaaaaaagtgaaaaggtattagaagataaaggcatagaagatggatttgcttgattagacagaaatcattttcaggtagatgttatctgcgttccatatgggtccacattaaccaagtcagacagccttctgtctgtggggtttctttttcaccttatatctttcagaaacgacgggaacttgtattgaaagcggaaaaatcagtatgttaaatactttaaacagatgataggtccagagtatgtttcggaaacagttgggaacaaccacagcattaagagcaaaacctctggcatgggtatgggtatgtggtgttcaccactgtactgtttaaattacagggaaggcctcaaattccactgaagattccagcctacaatgggcagccgtagcattgccagcattcttttctcttgtgatcgggtttgtttttggggccttatactggaaggtaagtgctgttattccttttttttttttttccccttaatcaaaaactttacatgtttatttgctcatactacattacataaatgattaacaaactgcccttttctaagaaaggatcctaccaagaaaacaataagacaggatatgtcttaacttacagcctccacagaatataaaccttagaaaggttcccccattcctccttagttttgaagaccactcctctaactgagaatgcatacttaagaaaatgaaaactggtttattagtctgaactaaatataaaaaggaataaatatatgatgtgcttaaaattagctagaaatgccatttgtatgatatgctattttggatttctactcttatgttctcttctcattgaaacctgtctgaaattttttaatgtgctaaatgattgcaagtcaactttttgaaatgtctttttaatttgattactatttaaatctttcagtttctttactactctttcatctccaacatcctaaaacttttgagtgataataccatgcatttttcataatgtcttactgcaaaagtattttcataggctgcctgctgatgaaaacataaaagtggagactatttacctcttaaataggacatgataattttacaatacataccattgttcttttcccagaagaaacaaccaaatcttacaaggacagttgaaaacagacagattaatgaagaggataatgaaataaggtatttcatttgactaaatatgttcatcggtaaggttgacctcgccactttgcatgccatgcctgtgctcataacatcttttaagaagtgtttcaccctcatgatggcagctcctaaccaattcttccaacttttagctccatttctgatctcccattgtctcttcagtcccacatctccacttacctgtgaaataccttcacagaagtgtcttcctgacccttcttagggtatgctctctctttttctataagcagcagaatcttgctcatcatgttcctggtcatggagcttgggaggcacgtttaccctcctcttttacatactgtaactgagacatgcttagctccttctttagcggcagtcattattttcatcttgtctgagttgctgccacagaaccttcctcggcccttctaacttccacctgtgtccccattcttgacatcccttcctagtcaagatattttcagtgcttttctctttcacacttcatctattagacctcactcttgcttttggagcctttaacttatctcaacttactcagtatttttttaaagccagatacaaaatttaagataccttccacttatgatgggattccctggtagctcagatggtaaagtgtctgcctgcaatgtgggagactcaggttcgatccctgggttgggaagatcccctggagaaggaaatggcagcccactccagtactcttgcctagaaaatcccatggatggaggagcctggtgggctacagtccatggggtcacaaagagtcggacacaactgagcgacttcactcactccacttatgatagttgacttctgatcactattttaccacatactgctcaggaccaatactttgactttacattcaggtttttccatatggcatgttattttctcttatatcatgttgtatgtgtacacactgacatattaagcacatacaagcattttctgtatatgtatcatatgcgtagagaattttttaactatttgaggagactgtgttgaagtcttccctgtagtaatattacgaaagtaaacttcccacccaattttgcaagctttttgctcctgtatttataaaaaagtaaaaactgccctttaaaatgcccagatcatggtatacttcagaatctgtcttaaagcaaataagcatgtttcttggttttcagtatgttgcaagagaaagagagagagtttcaagaagtgtaactgtggcttctatcaacactgttactttcgtacattggtaagttttcagaattcaagctaaaagatataacaggaactacacagcatcctagatgccagaatttattgtcttctatcaagctgatatcagtatgtcagctgaaactgttacattgaattatgcattctcaaattttgaaaggcaagcagtgttattccagattagtggattcatcttgtagaggaattatacagaacattaacagttgagtgtttcctttctttttctttttttttttggccacaccatacggcttgtgggatattaggtcactaaccagagattgaacccacatcctcagcagtgaaggtgcagagtcctaaccactggactgccagggaattcctgagtgcttcttatttttgaggccagaaaataaataagagggatagagcaaagtaggattaaaataaaatagaagagaaacaaataaaactgatttcaattaggtgtgattact

SEQ ID NO: 216 - DNA, 101920 bp, Hippotragus leucophaeus
  source 1..101920: mol_type = genomic DNA
agcgcgtatctccgccacccgggacggtctccccgtcggccaatcgcagctcagggctcctgaccaagctttgggtgaaagaactaataaatgctcccgagcccagatccccgcactcggtgtcacgacgggaggagactctcaggccggccacgctcccgcccccaccccccctccccggctcgttgccgagctccgagccccctccccagcgctcccagccgcggggccgccggcccagactcgcactaaacttttccgccctgggctcgggatcctggactccggggcctccctgcccaccccctttccccggttccacctcgagcctctttttggactaagagcgagcaaaccccctttcccgggtccctcctttctctccagccttttcggggagggactctccacgctcgggggagttgcctggggtccccagcgcctgtctcgtctatttcgccttcacctggatataatttccaagcgaagctgcccccaggatgaccacactggccggagctgtgcccaggatgatgcggccgggcccggggcagaactacccgcgcagcgggttcccgctggaaggtaagaaagggcctcagcgccgcccagatcgtgggtccgcggccaggctgctccacccagccggggtctccacgggctccttcgacgcgtccaggagcctattcccgggctacccccatatcaggagggaacagtcgggcgagattccctctcgattttctctgggtagacgaagcgtccttttctctgtaactcctgccggagcttggcggccaggcctgctcctgggcgggtatgctttcccctgttgttttggaaatgccttggtggggcaggggtcaaccggcttttgagcaccagcaagcaacttctcagcactttgtgcccccgaaggcatctcaaaactacctcggctgttcctgtattcgctaaactcttgttaattctggaaggattttcttagggggtgagaagttgtggtggcacatgcccgtgcagaatcgtgctggggaatttttagtattaattgattccttaattagggcctcgtttatctccagcttcatctggaagtttccacaacccatttggcggaccgcctttcagttagtctgaaggttctggactccggggaggcaggagaccttgcaagtcctttttcggactttctagacagtttgcgaggttggggcgcctgagccgggacgctgaccttgccggtgcctgggcttggcccttagtctgaaataggatgtattattaataatagccagagcaccagtggagcggaggggcctatgagcagactggactgtcgtctctggcccgaggtgtaacaggtgactcgcgatgacacctgcggcttgctttcagtaccctctttgacctttgcctgcagcactcctagcccaaaacccaaagggttgtcaactcctccaagtttcttagaaagaaaggccccccaattagacagggtttaatgccagccgcagaagtcctgggtgaacttctctctgcagggaggccgttctttcaccagcctctaggtctccccaccccaccccctgcccctgcaaattgtcccctttcttgggtccaaagggaagacagattcactatagcgagtttattttgccatggtggctcctttcacacaagattatgtgcccttgaattgcctaatagtttgaacaagtgtggttgaagcagggtctcaggttgggagcccaaacggagcaatttcagtgctaaggctgtaacataccaattggccagaagagtgtgaaattggggttcatctttcgggctgctctcctctctccccaaatgatcttccacttgtctctcttcttgacttctgttcccagtgtccactcccctcggccagggccgggtcaaccagcttggaggtgtttttatcaacggcaggccactacccaaccacatccgccacaagattgtggagatggcccaccatggcatccggccctgcgtcatctcccgccagctgcgtgtgtcccacggctgcgtctctaagatcctatgcaggtatcaggagaccggctccatccgccctggtgccattggtggcagcaagcccaaggtgagctcgcaggcctggccctggggggctcctgtctggagttagggcagagtgggcagtgggaaaggactgccagctgggactttctgaggtgtttttttccaggtctgggaaggtgtgtgtatgtgtgtgtgttgggggggggggcggtggtggtgaagagaagggtctacagtgctgtttgagctagtacttcttgataaatgctaaggaaaaactctagtctttttgcaaaggagataaagcatttgttttgtatgcctcagaatcctggaattttcatcaacttgttttaataggcagacacccaaagcgtccaagctgtactcacctgttgctggtttcttctccaagtatctctcaagctcccagtgactacactgcccattccaaatttaatccaaggagccactttgggtttttgaatggtttcactcccaactcttctccccaattgcctccagtccaaattgtcttcaaggaatcaaaagctagggtgatttgctttctttgtaatgagcctatgacttggcttttgaaagacagtttggtgctatcctcaaattattttggttctccttacaaaaggaaagagaatcacactggctatggctgagtgggaggggactgcctacagctgcccttttttctggatgtggggaaaatccaatataattttctggttgccacagggcaaaaccaaaaggaggattctggtaaactgaaaatttccagacaactgcctttccttgcatgccagcccgctttgcaacctctctaagaatctctggaaactctttttcttggggaggggggtggtggaataaagagcctgtctttccaattaatcatatttgctgccactctgatttttaatggacactcaacttttgcgtttcattttgctcttcacttgagctaaaaccttgaattcctttgaaaaggcccaagttacagatctaacctgattttttctgctcttctttcaagacttccttttttagtttcattttcctgttgattcagcataaagggttgcctttctttattcccacggatcagaaagtacaccccttccaagaggtcatacctctttttattttatcccaactgtgagagctgatctggggaggaaagggttgggatggttttccctctgcccttttctaaggtacactgctccgagagttggggtccttttgctaaccaggggaaacttgccatgcggcacaagaaggagcatcccgccaggcccggaggcggtgaggccgccacatctggcccagagaactgggtaccaacgccggtctgccggttctcttaaagcaggtgacaacgcctgacgtggagaagaaaatagaggaatacaaaagagagaaccccggcatgttcagctgggaaattcgagacaaattactgaaggacgcggtctgtgatcgaaacaccgtaccctcaggtaccaggctcatctgcgtcttcccaaggctaggcgtcagtcgctattacgcgggcgggccatctgaaccataatcacccccagtgatcgatctggatgatcgggaggcggtccctcccggggctctgaaatatttacgaactagccgttttatggagggagtgatcagctgcttgtcctgaggttgagagaccgccgcttagggctccccaaagagggtttctgtcgaaggggcagggcaggaaacgcgaggcggaggccaagcgtttattaatattgatgttcccttttaaagagaaacaaatgttttggtaaccctaaccgaagggagatggggccgcgccagtcgaggcttctccgtgcgcgcacgggaggggagacttcggcaacggccgggagatttttttccgggagagtcccagggaccatccggcgcccccggcggccagggggaggcgaagggagaataggggcgagagcagggcgagcgcgagggcgcacgggtttgtttttaattagaaggaaactccctttccccccgccctgcgagaacgagatatttcagaggatggatttgtttaccagactggaatctggaaaaaataaacggggaagagtgcattttcttttgatttttacaataggaaacgattctgcagttgaaatttaaaccctttatggtcgcaaaagaaaaaagtcgaattgcaggggatggagccgctctccttcttcctgccataccgcgaaccgcggggcgcaatgccttcagcttggggtgggggtgtgccgggtgggctggcgggagaattctctgagactggagatctagagacccgtctgtggagtcaggagggaggcttcctactggggagaaggacccgtatggctggctgttcccagcccctaacccggaggtgtgagctttccaggctgcggtctccgtgatcctagaagacgctcatacaatgggggtggggtgggggtaggttgagtgggagggtgaggcggggtgtagaaggacaaggatgcccaaagatgcaggaggggacggaagcaaactctgcagggcaggccttcttcactcccactccgattaggagctgggagccccttccagcatgatcctgcaaatctcagtcgtttgcgcccccttcttccttccgcccccagtgagttccatcagccgcatcctgaggagtaaattcgggaaaggcgaagaggaggaggccgacctggagaggaaggaggcagaggagagtgagaagaaagcgaaacacagcattgacggcattctgagcgagcgaggtaagcggcggcgctctgagcggcgccctgcgggctagcgcctctcggactccgcgctctgaccttggaggctcgagggctgtgcctccccggctcctgtcaccgtccctcctcactcgtatccactgcacccgggtaagagcattgaagaaaaagacccgagatgcactttcattgaatacaaaaatcttttttctctcttctctgtctcataaatctttgttccgcaccactcacagtctctcggaatctagaactacaaattgcggtctggctgaggggctatcctcttgcccgcaggcttgcaagactgcatctgagcagtttggggcctggggggcagtctttgagcctcttgaggttaaaggaactttttgcgcccttaggaaaggcccagagtctccaaagagcttccttggttgaggaggtgggtaggcaggggagaggaagagagactcaaaactcctgaaggcagtaggttctcaaagttgcgtcacactgattgccttataaatgtatatgtgtacgtcggtggtttttcctttgttttaaattggtcttcaagtgcggtagggtttgaactgtgtgtgcctgggaagaaaaacaagcttaagatctagttacaagcaaggggctctgggttctcgggttcacagtgtgggtgcactttctcttcccaggggtgtcttctccttggctgtgatctgtcagcctcaagagaaaaacctcccctgtggagccttacatgtaggcttggggtgatcttcagagccccacagaaaaagtcaaccccgtgggagttgaactgggaagggatcctggcacaaggagagtctctgcagttctgcctctcagcactttttgcctgggggatggttgcacctctttcgaggcccaaagggtcgggagttgcccggtgttcccacccatgcatggccttcccttgctgggggctgagactcctgaggctgagtggacttttgagttgacctagaagggcaggcggctctccaggtgggcttggagtggtcaatcacctactggatctgagccctccaccagtggtgtcctgggtaggactgtggttcggggaactgttgcttttttaactttcattgctcaactccagctcaggccactggccctccggagccggcaagctttacaaatcaataccaaatctgtacacaacttcgaagagacacagacttagatgttacaaatccaaaccacagtttgtagggctaaactgatgcctagatgctctggcacacacaggcaatcaagacataaaaacccagggcaggttgagtgaagaagacacataccctgtggcttccctcctttgaagcagaggtctcacacagactcagtgtaagcccttgtttttgaaggggtgcctttctgccctggtctctgagaggatgcctggcttttagtcctggtctagatgctgtattggagatgctggggagggaagaaggcgagaagccagccaaccccaaacacaacaggcccctacaggcactgaacccagaaggaggcttgggaaggagggtggaggtggctaggctttgctacttgttgctagaggcgcctgcgccgcagctccatcgccgcaccggcaaccgagggcccaggagacaaaacgccccaaatgagctggtcaaacatttgtacaacttttccagcttttacaaagaaggccttctctacacaatctacacttggagatgaacttgggagacaaagccaggagagtccattgaaactcacactttagctcggcccagacaaagctcccgctcgcagcagcttgatgtgaacaaaggaaggcaacctttttataattcaaggagaaaagaagagaaaacagccccacaaagggccgagaatagacattatgggcttgcaatgagggatgaattattcaatgagccccaagaactgctgcgccaggaagttttatggactctccagccgtggaaaaagtggccatttcacctacaaaatgtttctagtctttcgggctgtctagctggggctgctgccattcaagggcaattgctaccatttttaaaagcagagtattctccccagcggggctgaaccgttgaaaacacacacaaacacacaacgcggaggctgaagtctaatttaatttggagttgtcaagcaagaggcagtgtcagtctcttcagcgcctctagctccttttccagatgagccctggagggcaagaggggcccagagaaaggacagaggggaatggagttggaagggaagtttaaagatctcaaaaaggaaaaaaaaaaaaaaaaaaagattcccggtcgtttgggcagcaaaagtctcaggctgcctggcttggaaaatagaatgaatgttgacaaaggggtctgagctcccaggcgggcctaaagaaggccgtttgggcgtcctgagcagggcggtccgcgctttctgaaggttccagattccttttcggcctgccggctgttgctgactggctcttctcgggtgcatctttctacttgtcagagactaggacatagggtgagaggcaccctgaaagaggtcagaacagctttcgtttttctccccagggtctcgttctagatggccccattcactttcccaactttgccttgtgcgtcgccccatccaagaagaccgtggctgaccgacccggtgcgcgcaggcccgtgcgccctggcacggaacagactgcgcgcccctccttggatctacacttccagctgttttgccagggtggaaggagagggttgggcggccaggaatcccccacccttcccaggaccttcttcactccccttccttcccctccccattcggcaccgagagccggcagggcgcagccggagaaacccagccccggtcgcggcaacggggggctgtgggcaaggcccgcgccgcggccactcaatgggtgcctctgttcctcccccggcgcggcggagcgggcccgcgggcgccgccacaatgggcacggcccccactcttgcgccctgagccaaagcgccgcgccgcgccgccccctcccctgcgctccggccggctcgaagcttagctcgccgggctgcagccgactcaattgcctcctttatgtccttctcactttcatctagacacaacccgcctccccctccttcttctcctcttttttccccttccttgcctgaggctcacattagtgaaatttctgcaacctccccccattttttccccctcttattttaaagaaagcccttaacacaaaagcggtgactaatcaatagaaactgctccttcatcagctcctccccccagcctcctcctcctcctccaccagcggcagggtgacgcttttcctgtttgtgagttttgggaaacatttttgctttgtgccgtaatggaattagaggacagatgaggactgtaaatggacacgcgactgcaagactctcgcttaaatatttagatgcaaagttacaattactgacttgttgcagcagctttgaagtggcagctcgggggtgcagggggaaagaggccagattgccaaattgatgttttgattggggctggagatacactttcataggaccctaaccctttttaagaatcaccagctagcgtgggaggtttgcaacagtttcaaagtttgagccaagagacccaagcgtaggtcggttggagcttaccctccttttatatagatccctttcaatttggcatttatgaaaagcagttggttgtttttttttttttttttggatttgagaaagtaaaagtgacaaaagctttgcgcgagtttgcaaacttgtgagcttttctaaaattaacgaagacgacgtcatcttttcagctgggcatacgataaaacaaacacgtactgacgttttaaaggttctggaacgatttcgtttcctgtgggatcatgaacattttatcattaacgggagcactgttgaaatcgagggggaactgaaggcagtttcgtgtctgccccctctctaccccaccccaccagttagcagggaaggacttttgggcgcgaggcaaagggcgggggtcaggcgggggcgggtggggagggggaaaatctttcccacagattaaaatcatgagctataagatcttaagtttgtggcatcggaacctttattaaagtggacagccaggtctccatttgtcagaatcacgaatttgaccccaatgtcgtgtcttgtcttggggggggggtaaatttaatgttttctgaagcgcctaaaatactcaacaaggaaatatcgcccatttaaaaatctatgggaaataccagaacttgaattaaattgaaacagcacgctgtgttcttttcgaggaggtaacggtaacgattttcccgttggaccgatttgaaaggaagcaaccgagatcagattgtagctttctttttcgctggttggttttgtctggttgactgctgtcggcttactttatagctttattgaaaacatgcagattttctaattaatgcttgaaattgtatgtttattttgaagtttgatttgctgggtgatagcaccggaacggggacgttggtgcttcaagtgcgtaataattactgaagggtcatttaagagtccccagggctatgcaataaaacccatccgcgcggcgaggtggaaccagcaagtgcgcctgggttcaaggggtggaatatacggaaattcatcaggtgaatagcagtgttgccaccgaactcaggttcaacgttcacgagtatatgtatttttgagaacaacaacaaaaatccttcgtaaccacgaggttaaatgttaacgtacatagatagtcaatgaatgttaaaagcttcaacaacagcaacaaacaaatggtgagagtttcgccaggcttgaggcagagaaggttctgtttggtggggtcctaccccaggtaatttatttaggcgggtaaatgaagattaaagaaccattaagaatgtacatatataactaacaagacagtaaaaggcaattaagcagtcagtttaatgccttatctcactggctgctctggggttgttttacaacaaggaattaaaatctgaaaaggaagttttcagcagctctggccaaatattgattaagtagctgtttgttgataccattgttacgcattaaaaggccaggatcgcggcctctcagtggccatcttccattgtgaaggattcttaaccactgagatcaaagcgggatcatttcaacttatctgtcttggaaaatcccccttttcctctgaaacctctaaggaggattgactgaattctctttaagaaataggaaccgaaaccagttacatgtcctaggtttgtagagaagagattcatggggtgtttttaattatcctatggtgatttcttgtttaaaactgaagccaagatggtgaatttatcatcaaatagattctccttggccgggaggtggtgggaggcatggaagctaagatcctagtgtccactaaatttctaaatatggaagttttactgaagttgctttccaagctggaatgatgtaaaggcaagatgtcagagttttatgtaaaactaggtggggaataattaaatacacaggaaactgggagttagattaactgcatttccctacatatgtttccacaatttttctgtttatgaatggttagatgagtcccatgtatatttttaaacctcctacaatgtaggagcagatatgtttgtttgtgtgtgtagtttgtgcatcgttagagtttatttataagtcggtcactatgaattatgctggcagtaaactatacccagttgcacacacacacagaaaggtttatttgtcctgtggattacactttctagagtcatcagaatttgaggtaacagcacagcttcccaattcatactcagcactgctgttgaatgctaggaaaaatatttccctgaataattttatgacttttttggactgttgatttttcgatgaactgctagactttttttttttttttttggtttaagaattcaatatatttggaaagatttttcttttattatgagagctaaaattcctgcaaaggctcttttggaaataccatctctgtgcttaatttgcaaattccaacaaatcactctaactgaggttgtgaaatttatgccagattcggctttgaatattcaactgagcatcatggatctgcctgtgggggggattttctgaagccttctctgttcacttctctactaaataattgtgcttagagacttatttttatttcatttgattttattttactatgtcattcacccttgagcaagatgaatcttgacatacagagtcagaatcattatgagtattttctaacattttctattataattcccaattaattaataatctgtgctcaaatgtcctctgaaatagtcccaatcattgcacattgggacaactgcctgaaatagattaagctggaagtgtgagtcagtgcagattgattatgactgccttgtcctgggtccagatgcagtgctagagaattctttgctgcatttttcaggtatatgtgtatttcatgtttcacatacatgtggagtaaaagtgactgtcccctcttggatatcaggctatgtgttcatatactgccagggggacacagagtcttactctgagtggggcctgacctcagtaccaaggcagaattactgacttgacagtgggcttatgttaattatatctcaataaggttagaaaaaatatttgatgttattgttgaaatagaaaagtgctggctaccttagctggagaattgtgattgaagaaagtgaaagagaatttcagaagttgctattttcttggaagatacacactaaagtggggacagaggaccgttctctactctgttgggaaaggtttcctcaccccattcgtcccagtcttgggtggagagtggcacagttcagctttcagctttatgttgtggtattgggccaaatgctgaactccaatagtgttgaagttttgctggaatggggtcatctctttcctaagaaagcatcctctcacattgtctgtgatggaattatgccctcaaatgaacagaatatactttccagtttgtatctggaacatgcagttatcaaaatgcccattaggattataaaatctttatttaaaacagatgagttagaagtttcaccattgtcaaagggaattatgaaaaccatggaaaatagttgttgaagacagttgaggaataaaaggctttatgaatttttatcgtcaaagtcagtttttcttcctttctgataaagaccagggagactgacgtaatttctgccatggcaatggccacttccctttaaagaagtaattgcatcttaataaaggataatggtgtaaaatttagaatttgatttggtgtacatttgtcctagaaaaaaattcctgaggaagagttttaccttagatgttgtatataacaaagttcgtaacatttaaattttagctgcaggattttaagtttaaaaaaaaaacaacccaaacaacaaagaaccccttctctctgtgatgaagcaactcaatcaaaacaggtagactgagtttttactgcagtggctgggaaatgaatcttccttcataaaacaaattggaactcatgacaggcaatagcaaaccggccgtgtttatctccttcaacccacttagtgatttcttgattcttatgtacttttatttggccagctttactgtatctacagtattatattaatataaacttttgattctaggaaccaattccccactcattctggatctgattccattagatctgttttaaaatagctgatcaaaatgctttgtgacaagagtgggagattcttcttggccgactaacataggtttgggggagaggaaataccagactttcagcattaaaaattttcaggatcatattggaattcaaatagtacagctaaggaggcttaagtggaaatttaaaaagattttataatcagatggtaggcatatttctggaaacaacttcataatttggtgtgcttggccttatgtcattagatggaaacaataagtatgttaggatagaatagctaagaaagcaaagttaatggctttgtgcaatttaccttatggaattggtttttgtatactttcacagtcaatgcttacatggtcatgtacaaatttacatttttaacagagagcctggcttgtgatttttacaagtacacagataaagtagaagtacagccaccatacttatatctttttttttggcaagccctagtataagcatcaacttacccagtcaacaggcacttaggcattgtctgggggtattagcatagtttttgtttcttttatagggtttatcttttttttttttttgaaaaaaaaatcttattttatatagacccatagaatctattttcaaacacatattaaaaaattcttccagtattcaaatatactattatgattaagaaaatcttggccacagggtgtgtgtcttccaattaccatggttaagcttaacctgaactaaagaaaattaattggtccaattcattttattataaaaaaaaaaaggcaacaggttccttctttgtgaatccccacttggctggtttcctaactgaggttcactaatacaattgagtgtttcttgtctgacttaaacacaccccaaagtcctttatcatgtctttgcttgcctttaagagcatagcacccaaggtaaaagtagtctatcttacatcactaattttgcttgaaaattgagaccgagcacattttgggtgtgatcccttgaacttcagttttgacagctggtaagatgggggcatattatactgtaccaatttccctgagtggtatgagaatgaaacgagaaggtgcaagttatacctatctcataggaaaactcaaaaccttgtagagggaaaaacctctgaacttacagaaagtgactagtctgctggcagatgggctctgcccaagggcagataaaagcttaattccggcttaggagcaacaatgaagaccaacacacatacatgcacacacgcacgccacaaactccactttcactgagttagaaaaaattgagtttataagaaactctttaatagaatagtctgtattgatttaatagatatggaaaatagcaaaattcaaaaaccatttgctgggatgtcaaacatctttcttaactacttttttctcctgatctgaaagtttatttttctctcttagactaacttggttgttgaaaactcttccaagtcaaactttgttttctttgtgtatttgcacaagtcttccctcactccccttactaactgacaaataagttgctttttgaaaatggatctcatctatgtctatacgttcttactcctgaaatcttggcgcaatcctttgtttgtgtttgtataattcctcatcgtgtcccttcttcagcctgcttccttgttctaaaatgtttttatggctccgcatatgggatggtgtgcattcttaaagctttctgcatgattcttcttaatctccctcctttaaaatttgagttcagaaatattaaggaaattttccaaaatagcatttgttaagctggggcgggggtgggggtggggtggtgggatacatttcagtgacctcgctattcagttttactctgtctagtccccaaagctggggacttctatgtgaccggggtgctatgtgagggtgaaaagaaagtagcctggtttgtaagactggggttaggggcgcggctggagagctcctgccctgtggttcccccgctggagcagcttgccaatgcagccactggagagaaggaaggttgttttcttatccccgcatgcactgagctgacctgtctctgaaataggtcaggctggggcaccgccagtttatgcagctgtcacggcttaggcgtctcagcaggcagcccggctccttggccagtcggcccccagtgaactgataaaaaattcgctggtgagccctgggccttccttctggactgtgctggccccctgaaggcttttagaggcaagaggactccaggattatgggggccaacgctcagcctcaaaagggaagcgatcttttattccaaggattgccctcttgtccatctgaacactcaagtgaaatacatgctttgtcagatggcattttaatttttaattgtttattttttggctgcaccacgtgacatgtgggatctttgttccccgaccagggatcgaacccccgtcccctgtatcagaagcatgaaatcttaaccactggattaccagggaagtccccagatttttaaaccatatttatttttgactgagtaaacctttcactctgtacataattcaaaagatagaaatgggtgtacagggacaagtttcctctcacccaagtcactcagtaacttgattgtctttctagagaggctgtataaacaagcaattgtatttctttctctcttaaaaatattctttcctcctttgtttgcacaaatggtagcccactgtagaaacttttctgcgctttgctttccccctgccccaccttcgaatatatctctgccatcactccacatcagaggctgagggtctcctcagcctgtttgtatagctgcatagtattccatcctgttggcaaatgatttatttaccagcatttagagtgtttccaattccacagcaccatttggcacatgtgtgagtttatttgtaaaataattgctccatggtagggacaaagggtacgacattagtgattttgatagctttagtggaatttgggttctgcattgagaacaaatggtgaaggaatgtttagtcaacatggagtgtgtgcaggtttggctgtggccacttgtatgagaaaaaagagacgcttccttctaccactgtatgtaggtaggaacataggtttcgaaatttctgcttggaaattcctccagtattttggtatttctccaaatggaacattctctaaatccaaggaaaggtttttttccttgacttattagtgcctctttttattctatttttatctactgtttatttcactcttcctccatcgaaactagtacacatatgttaagcactttttttttttctatactggaaaaactattggtagtttttagaacaattcagagacaacttattctgattgtttagttatatgagaaattgtctctcagggttaccaaattagatttgaactggtaagacagcaggttatgaataataaagcagtcttctatttctcatttttgaaaaagtgctggcctgattctctagggttttcttgagtttggtaaaggctagtttttaattttatgaacttttaagggggtatgtatccattcccttctaggcacaaaagactttttatatttttgcacataccttgcctccctcaaatcatttcagcccattttcccttaaatctgatgctcaggaattcagtttttgatgctgctgagtacctggcttacctaagctggaagttcgaatctgcagaatgagccagaaagtactgtgttccaactgcatgagaaaaacaaccctctccaaagcccccaaagaaagctggagatgtgaatgccaataaatattttaaggtcaatatttcaagtcattccttcttaggactgagcctttcagaaacaggagaacaagttaaatgttaaggatttatttttgaaaatcaaaatcttgattcggtttttaaaaataacagaaaaacaaacacaggtcttctttcttgactgttcctgcagccagccccacagcatgtagcagtgttctactagacaggaggcaggaaagtgggttttcctaacgctagagcttttgtttgtgcttcgatagaaatggctatctgggtgccttggttgtcttcctgcttcccctccaactggcttatggaactccaaaggagtcagttggggatgtaaacaggcctggcatttagagcatctgcaaagagctgagaagaatcaaaagcagcttttttcccctctcccagctctgtgcataatttggattgaatcaggcccataatttgtgacatctgattactacctgcaaaagtatgcaggcctccatgtaggaaggagaatattgggaaggttaatcccaaggaggaaaattgttgacctgtttgtcagcttgctatgacgctctcaacagaaatttagaccatataaaatcagtggcttttgggtccatgtcagcagagtaaccatacttcagattccccacatatcctcacgttgttctgatcacagaggtaaagaaagtagcaggctgaggcgttctctggggaattggcttactattagggaacagggagttcgttgggagagctgccccctctgaattttagatttataactttttaaaaagagacccatgaattcacctggagaaacttcaactttccattgcaagattcccaggtgactgggatctcagtgcctggaattactggatatattttggaaacttttagaacttattacatcctcttagactatttctaaagggtaatgatagcccatgtcaggaggttgagcagataaatggggtctctcccagtgcatcctgggaacttgcagtcctgcctacacagtgcatccgggtctcctcgatgcatccggggaacctgcaagacgccagggccgaataggatttgggaagctaaccaggatggaaactgtccaggttgtagatttgccctaactttattcctacaggacgcatctggggctcgtgtgcacgcaacacgtatttatcaggggcctgtaggaaagcaaattgtgtagtctcttaccagaagccaatgtctgcttgtggtgactggctagccctgccaagctcggaaatcgcgctgaagttttgtctgaaagaagagaagaaggactgcggacttagcatcggatcagaatctgtgaagaacctggctggctaagagtgcaggagtgaggcgtgatgcctggttgggggaatttgtcccattctacagggaatcagttccaggtagagggcccagatggtaactcaagccctggcttattttggatttagctcctgggcttttgtctgaactttttgagccttaacctctgccttcatcctgcctgtggaaagtgggttttcttgggtcgtcatgagcataaagctctttgggggctgggaaggctgcctcattttgttttcttcagaggttcaataagtggatgtggaaacaaatcgtgttcaggtcaagtactcattccctggcacacctttgtgtcatgtggtttgtctttttagaaaaattgaaaccaacagccactgcacaagcttttattcccagtggagtcctagcagataccttgggcagataaggagaggaacaatttccttattacaaaatacaaatgacagagagagccgaatttggtcttcatttcgctggttggcgaactttcatcattttattgaattactgtaatttaatgttactcgtttaaaagtaacgatttttcccctgaaatgaatccttttaatttatttttaaattgaaagctcaaattaaattcatttgggaagataattactatctttcacattgacatttctggttcttggaaaatccttttggaaaaactttagaagatggtcactcagaccatggtttaataagaagtgatgttactggaacaagtttggtttttttaaaagatcatttatttggctgcaccatttcttagttgtggcatatggactctagttccttgaccagggatcaaacctggatcccctgcattgggaattcagagtcttagccactggaccaccagggaagtcccaagtttgggttttttacaggaatgtttgataatctccttgccctcaatcatctgttcccaaactccttgaaaatgtttttttcacttgcccttcacaaagggctttataggctgaccttgggtaacaagggggaggtcagtcttagctgctgttccctctcctttcctgtctccctgccatcctgtttctttctgcctggtttactctccccttgtgtaccctgattccacgcacacacctaccattgcttccactgagctttattttacctcattcacatgaagactcaactgttacccttcctaaggatgtttgcagtttctaaaaggcccctgggagctggtttcctggcatagaggaatgaactcccagtggcagaattccaggtacccatgtaggacagctttttgatggaggcaaggggcaggtttctgatgcccctcaggtcacaccccagcagatagcagcttcactgtggatgggcaggattagttctgctccaaggaagctctttgctggtgagtgtggctttccagggcatggtaccccactgagtactcacggggcggcagggccaggtggggctcaagagcattctcccctgcaggtggatttccgatacatccaggatgccagggaagggccttggcttgtgtcctttgggctttccggcaaaaagcagggccagaggaaggatatgcagcgtctgttctggcttggagccagggagggcactttggagcccatcctgcctctgtgctcacaatcctccaaggaagcagatatctgatttgggtatccgtgcttccagtggtgcctggatagttgtcagtggtcagaagaagtgaggttctcctcctcaaaatagatagggcccaaggggcatttatgatggatccactggctaggagagcttctggaaagtatcctgaagcacttccaggagtcttccagaatgcaagagcttcctaaagtctcagtgctggcattctggagagctcagaaacatgtggctttggaggatgtaagccactagggtcccagagggacccctggcatttggtccacctgtgatatgtggggttcagaaacagcctgctgggtttgttgactctgatgatcttggcttactgctgggcccccaaagttgacacttagacttgattaatgttttgcaagtattaacaacagtgcatacgagcacctaggaacagcccccatctctccttggccctctcaagtgaagaatgagagaggagtcctgggcagaggtgggtttactgcagagctgatgaaccttcaattccagagcccctcacctgcgggtgtcccttccaggggctctctgaattataaaagcttcgggtcccatgaaactgcatctactcttgtccttgttcagtttagtgtgggaaaggtagaggcggcctgtacgtacagtataggcctggcacagctgtgtttgagagcaaagcaatgataataataattatgatactcagttaccctccacttgtatctttgactttaaaagtttccaggatgcttccttgtttcttctgccctatcttatttacttatggagccaaagtctgtgtctagcaatccaaaggtgctgagaattcacccatatggcccttctactgcacagtattctcagtccttgcatggagacccttacagggatcatagaccaccagctccatcaatctggaggaacctccatccactcactgcgtacaggtcggtgggtatgactgtaattctgggggtgggggtgggggctcggtgccctcagctgttaaggtgtatttggcaatttttagacatttcttgtaggtctttacaactaggtaaaggtgatggtctttcccagcctggcaggttgtggcagctgcggtcacatgaagctcttgatagactttgggaaggcccagacagctgtttcaggaaacagtggggcctcaggcagtcagggaatccacgcaagaatggagagggctgtggcccctcagtgtcttggacggtgagcagctcctgcctgttgtttgcctcaggggaaggatagtggcagtggggccttgctgtactgttgagcaggtggacaccctggcttttccccatccatgtggggaaatgcttgctttcttggtcctcctttcatagctgcagcttccagatgaggctggaaaggcctgggggtattggttagagaactttgctttaagttagagttgcttaagcaggacggtaactttccttctttcacatcatctgtgcctggacattttccctgacacccagagaggggcacagatttctggcagccgacaaggtcaaagctagaaactgcctgggcttgaggagagaatcaagacaatggtgcgttcacttcatcgaattcggctgtcatttcttaaacttaaattagcttcctcacttgtagttctcagaaactcagtcggataaacaagatttgtttttttttgattctgagttataataccggagaaggcaatggcaccccactccagtactcttgcctggaaaatcccatggatggagcagcctagtgggctgtcgtctatggggttgcacagagtcagacacgactggaagtgacttagcagcagcagcagcagttcgcatctaaaaacttttatcatttttttgagaactttgctatgaagcgttttagaaacttggagaggatgtaagaagtatttttttgttacattgaaaacagttcaaagcaagatgtcctagcctaacaagggaagatttcaataaaattttccccctcactttttaacttttatgtttgtggaggataattatttcaaaagtcaacacatactacttatcaactttttaatatatattctgaaaatagacaatggttcattcaaatgctacagcctttaattacaaagaccaaatgataaaattaacaatgtaaaatgtgttgtgaaaagtcattttttatttgaggaattttaagagtatataaaatagccaatctaatatttgcatttataacttttcttatgtatctgaaatatgtggctctaattttgttgtagttttatcttaagcaaatagattttgtaagcgaataccactacaacgtatataccaatctttaaaaatagaagcagaacattataaaattagaatatcaggaagagaaactgtacccctttatacattcagaataataagtactattgtttaccatatgaaagagcttgtttctgtttttcttagtgattatcctgtactcagatcaaatgttttgcaattttgaactttgaatcacaaattaaaatttttatttgataggagagaaagtcactacttgacctatagattaaagaagaaatctgatctcagctacttttagtcaacattagaatttttgttgagtaattccataccaatcaaaacaattaaaattattgactcccttttctgtatccataagcaaacttctgacttatactgccacgtgaattgagttccatcagctttgaagaagtcgaatttgtgagagttatggcattcatttgtttaacatagcttgaatagccagataactataacttttaaaacggcaggcatttataatgccaagtttggggtggtgagcagtattcgatctgagtatttgatttcttgtacttatttttttttcatgttttcttagggaagtgctagttgagaatcgaagaagacttgttattctatttaactatataaaaacattaaaacattttagggaatgcaaaaatacatatgcttcaggttaaaatattgagacatcttggatattttaataacatttccactctagcaaaagcagactttttaaaactttatacatgaggttacatttgcttattaaagtaatttgaacactttggaaggacactcaactttctagtggtaagactttctactgttttccatgctactatttatttatagatagagaaccattatgatcacttttgtaattgttcagaaggacaattcttaaaagtcaatgtgaatgcaaatgtatacgaatgaaagaaaacgaaatcaacaaatgctaaaactaaacagtaagatgacattctataaagtaaatataactgccaaataataatatatacattacatatttatattaataatacttataaagactgttgtacaattccgttggaatgttcgagaggaaaaatatccctttaggatttggagaaattgaaactgttgctgtttgcgaggaaagggacccacggaggaaaaaaacgttctagggaagtaaaaggaatatttaaacttcttcttcagaggctaaggattttgtatctttatatacagaaagaagattccttcctgaagttgatttctcacattaagattaaaaagataatttccctagaaagtgaaaaacaaaaccccaccaaactccaaattcacttgtaggatggataacagtttagatttgcttttactcgaatgacgggagttttttaatgaaggaaagtgaactgaggaacaaattcaagaaattatagcaccaacttttttatattgtggttgattttttttttttttactctattatagtcccaagagctgtcaaattacctaaagagaacaatgagtttctcaagagaaaacaaaaaggaaaaagaaaaagaaattacccagagatgctgcaacttacaaaacagtcactcctgctaggcttcctatagctttaaatgcaattgactattgattctatcagacctagttgacttaaaagctaggatggatcaggagctgatttttggcattccttcattttcccactcttttgttcacttgacacgcagcttttatacactggctttgcaggaaccactggcatgatctctgaacaatctgttggaggaggaaagggctcctccaaccagcagccagagttttaattaaatactgtgcatcccgtctatctcaacagctgaagaaatcgctgttggcataaaggtacccatgaacttatgttctctggggttaatacggcaaggagccttcttggtggtttaaaaaaaacaaacaaaaaaacagaactccaagctaccctcaatcatgtgattattattttttaacttaagaggactttctgaagcaacagtgcctatctgtggagctcaactcagtatcacgttgaaagggacatgcaggttggagaaattattttgtttattaattcaggttacatgtcctgccaggctggctggaagagaagggaaagtgaggtgtaacttttaagcacacactgatttgttcttattacataacaaaagtctatttctttatcatgttatcattcagttaataaaaattagctacaataacagcatcaacttaaaaacccctcaaagtccaggggattttctttcacaatgaacatgaatactgttcagaaatacaaacagtcaaaggataactttaggtctgaaagagaaacctggcaagggtaattgaataagcctgggtcccttgactgtgtcatggtgagggcagtcaacatgtcataattaggtttattgagggccattccaacaatctgcttctattcttcctgccttattgtccacagctaggcaaatagccaagggacaaaaggaatcaagtgctgacaaaacatgaaagaggaaaaagatttagctgcttttatcaaagaaactgagaaggactttgtgtaaataaaataagtgactggccatcctgcatttaggcaatgccgttttcattagaattaattcttgacatattggaagagttccaagggaaggatttctacttctgacaagtttaatttgtaaattaaaaacagttggttaaacatgagcctccatcaacaaaacttaaccaaagccatacacggcaaagggctaagcaggtgaaaaagagaattactttgaaaacaaagtcttccccaaaattatgcaaattcttattacttcataacaaatgtttcccattgaagacttacagcaggatgtctgctcagggaggtttgtttagatcacattttcttcccctttaagcctctttagttgacataacacttattccttgcttgggcaccgtgctgcttcttgggagaagtggcagcaagaaccgaagaggtagactgacattttaaaagaagtcaagctaataccacttttgtaagtctccacatttcaggaccgcctactctgctttttcttcaaggtgagagagtcttgcaagtgtgctttcaatgcctaatggggataaacagtggagactggaatgcggtttttcctaaactactaacagtcatcatccgctctcaggtcaacattgtgtgcctagaaggttgcatgcaaaccagcagtgctgttagttgagacttggtgacgcagagaaagtggaatactttgggagagagatgtagcttgcatctggacaaggctttaagtctagaaagcccctttaataaaacagctatttgtgaagttgcaatacctttcctgttgcattttttcagcttgcaaattaagcttcagataagggtcttttccgtgaacctgaatttcagaagctgcaaaagagtaggtggctggaaaagagaactctattgtgaacgatttgtctcttggggatacaaattttacttaagtactaagtgccccttagttttattgagagtaacagagatgataagaaatctatgactggggtagcttcagtgactaagctgtttcgatttaaaaacttcacactgctttacttcacctgacatattagagacttacattactgtattccttggcacttgaaatgagagtgaaaaaaatttttttttctcatgtcaaagaattatttcattccatccgatagtggatatgaaagagttaaagctctggaggaatgcaagacttcatcgtgatcatcagtacctttatcatcagtatcagtaccatgtttgaatggagcctctcagtggttgtatttgtatgactgtagcatcctgaggaagtattgaaatacatggtccaaacaattttcttgtggctcatgaagctggatctgcagtgtcttgaagtttattccacttgtggattttggtaaaaaaaaaaaaaaaacacacacaaaaaaccaaaaacccacacagttggactgctgatctagttctgtaccagatgtaaccatggtttttatgaaggattttcttttgttgttgttgttaaaagattttgctttaggtcccagttcagtctctatagctagctgagtgatgaagggaaactcagtagccattctgagttggattcctctgaagtgaggcggacagtaggatgctctgctgtctccaagaattgttatgatgtgttagtggccctgaatacatttcaagttctgggcaagtataaagaattacttgtttataatctacccatcgcttttgtgttcagcaaaacaagatttggtgtcccgtttgccttaatgtgctttcttagagtacagtttaataagaattaagtgggtcttcctgtggtcagtccagaataccctgaaataattctatatccaggacatgtgggacctggttgctgggatgatactgctttattgcagagcggcacactggtgtatctagtggaaaagtggtatgggagaagctgctttaaaggcttggatttgtgcaaaataagtctttttgatttccatattgttccgatgcccgttggctcatgtcacaaaattggaaggcccagcaggccaggaaggagtctttctggaaggagttggagatttatgcagattggctgcctctctgacatttatttgctgtccttttctcactctgttttggcaactctgaaccagatggacaagcccatggaaatgaaggccagtgaagagaagatgcttttgatttcttcaaagataagggagaacactttctttctctctttcttttaacatagccatggcaatttttttttttttgtgtgcacagatcaaaactggcaaatcacttttggagactgattggaacatttgaacaaggactttccttgttacgtcactgagagtaacataaactctgtttaccaaggcatccatggaagagaaatgtccaggcaatggtccaaatgttatgtctaccagaagccagccatgtactttgtagctgggcaccaagaatgttgtctgagtttcagctgggatgataattcaccaggactgaaatccttccttaatcaccaagctctccaaaaggcgagtgatgacgaggggaagcatagcttactgtttcactctgtaatcatttatgatttgagctgtattttaccttacagtgacctctggttctgttagtggatcattctagacttgctgctacagtattatagggaccaccatgaagacaatggccactaaatggtgatttatcggagagagttggaaaatatgaccttcatgcataaaaagatacacagaggtattttcctattttagatgcaaacgacagtctctgtactgaaagtgttcatgaagaatcaattatttaagcacagatactcactttgaaagtaattatgtcttgagcactgggacatattttgaaagataaaaatacatacattttaaagtcatacacttgtccctctgtgttacccatggtgcaaaatttcagactgaaaatatttcatctcaggcatgtgactgaacctcgtccttggaatttcagtgttgaaatatgggattaaaaatggtgaatggatttgctaattaggtgcagctttttttctttttaagggaagtacgggagggggatgtgcaactcctgattttcatcttattatttattgtatgttgtcgctgtctgtagactttttcttttatttgtttactcttgtttgtttgaactaatcactacttaagaaacagtcctctcaggacggacagcctcctcttcctgaagcctgtagcttcggtgaccgttcaggcataaaaacgtgcttatctgcaaatgaatggtagctctttgcttcattaaagcccctttctcttttggcactcgcattgtgaccctttgatattaattcaaagggcaattaaagaatgcggcccatctttgaagtaaggcattcagggcaggggtagggatgaacctgggcctctgatggactgtgtgtattcaacaggccttttcaagacagtttgaagtgagtcaaagaaaatgggcaggagaaggtcaaagagaaaaaaagggctaaagaaacagtctgtatttgttcggagtattagccaagcaaactgcaaatagcaacaaaatgaaacagttaatagagcagccagacagagccatgtcaatcacttaacttgaacagcgttaggcgatcggagctccctccactgtgttacctaattatcttgggaaaggcagtaactggaagtaatggtattgtatttctttctgcttactgcccagaaaaggtgataaatactcactgctccataattatgcaacatatatacataaaggagtaggagggggtgggaggaggtggaagggggctgcatgggggaggaggtcgcattgaagttgtgttcctagtcaaaggaccaaatatggcacaaatatggcattttcaaacattagcatgctggagaatcacttaactcatttcatctggagctggctgaaatatgcatgatttctcctttcacaacccttaaagacaaacacgttgagccatccaagaaaagttctttcgcgggggcgggggggagacagaaaacaaccaaaaaacttaacctgcaaaagctgtgctcaaattatatgaaggattgggctgagcgttaccgctgcctccgtggaaactgagtgaagccgccactgggaccctagctcttcccaccatgcctgactgttgagacactttcttgcaagaaaagtccagaataagcccctaaccttagtagacggtcgaggggaggaggcagaatgggtttctgttcctagggttaggaaggatatttttggattccacttttatggggtcattgtaaagaacaaaagagcatcaaccacacgcttctttgaatggtgtgaacaaacttgattttagaaagatttccaactccgtcaggggtgtctgggtaagagagggggaaaccccaagcccccgttggaatgtctgcagataggtcgaactgatctccgaattgtaaaacgcggccgccttttaaaggggccgctgaggactgtattcggatccttcctaacgggctgttgcggattgctgtttgatgttggctttgtgcataatgggttttgtttggagggacagtaatagatctaaagggtctgttatgcagctttttgacatattgttccagaatgtgtctattaatataaaagtttctgcctttgtaaaaagtccattactgaactaagtactcaattgcttggcattttaacacaccagtcctggcacttgaaaactgccttcttaaaatctgatttgaaggtcacccagggtgaattgtaaacagagctaggagaacaacttgtatggtcagttttttaatatattaataacttcagctattcagtagtgtcaacacaaattctctcttgccctgtgtaatgctacataggatggaacaatgtttgggagcctaaggggtatttctacttggaaacaaagttcaaatggagagctgtagctgcttaaaaaaaactggaattcagtgaatttacaaatttccttaggtgacctgcttgcagattcttcaccctctggcccaccagcaaagccagaagaggaaactcaggcaatagaaatagaataatctaggacattttcaccaataaaaaattgtggaaacttttccacttagagaaattttttttagacagattgggaaaaattgttttattttagttttaaaattactcaatttagagctcaattttatgtttttcaggatgatttaaaaaatcacagtatctggaaatattaggaaatgtccatcatcttgaatgctaaaaactgatataactttcagatcaaaatcagctcaaagtgggaagaaagactgggagcatctttgttattctttgtctttttcctaatcctgagtgatttgtagattttcacaaacttttacccttctagctcttttccccacgcaaatccccagttttgctgccagaagtgatggctggggaatagtggtgaagaagaacatttgggttcccttttgtctcctgtgttaagcttgcccacccttcctgaactcagaatccggtgcagtctctaggagactggttctgaagacaagacacatttaaacatttttttatttttaattggaggacaatcgatttacaatattgtgttggcttctgccatacaacactgtgaatctaccataagtatacatatatcccctccctcttgaacctccccccaagcccccaccccatcccacccctctgggttgtcacagagcacttggattgagctccctgtgttatacaacaacttcctattagctatgtgttttacatatggtaatgtatacctagctgtccattgacagatgaatggataaagaagttatggtacatatatacagtgagatattacttagccataaaaaggaacacatttgagtcagttctagtgaggtagatgaacctagaacctgttacatagagtgaagtaagtcagaaaaacaaatttcatgtattaatgcatatatatggaatctagaaaaatggtactgctgaacctgtttccaggacaggaacagaaacatggagacagacatagagaacagacttttgacatagcgagatggaaggagagggtaggaggaattgagagaagatacattttatcatttgctcttatacctgtggagaattggaattgaaatggatgagtctagcttacagagcatcagttgcagttactgcacttatcgcctctgctacattcaggttcaattccacatcctttcataggtctgtaatgcaaagaactccattctgtcatcccctcggctgcttcctagagatacatgaggaattcctagtatctgtatgatcttttggatctcgtggttttaatgatttcccccaaatcagaatttatccctatccttggatcaacagtcagttctccaggggccagacaggtaatgagaaagcagcaatataaatggattcctattttctgtctaaggatacagaggtgggagagtaacaccgcttgtaaaggcagagctgggcttggaccagctggtctaggttcgctggactccagaactgccactgtgtaactggcttgtggcttctgggaaggcaggtgacaataagaaagtactgagaagggggtctgttttcagggagcatgcctagcaactctggcagctggtaagtctatgaagtgcggccagtaataatatttgccttacaaaattgtgataaaaattatatgagaaaaaaaattatatgagagactacacagggatacaagtgcccctcaataagtgtcaagtactgtctttgttaatcttatttgtgggatgtggctcagaggtgagttcccaggaagcaaataaagcttcaagtatagggcttttaggtccatgagtccctgagggtgctagagtcctgggtggggacaggaaatcaggatgactttttgtgtaaggattcctactaaactgccttgagaggtaaacataacaggtaactccagtaataacttactgaaatttttctcccattcaaaataaatactcactttgtacctggcttttgtagttgtaaatttatattcttaagaaggtcccaccaaacctggatcagctactgggtatggccgtactattgggctggcccttggagagttatcctctccaggcaccagtgagccaggttatggcatgagtgggaaaactttactgatgggttagttaagagtttgatttattcagaggcattaactgagaattctatctgttccatcagattctatgtacatgcactaagatgtcaaaaccaccgtcctactctggaattgtttgaagtatggttagcttaatgttctagttcccagtatcctgagagagatggagcaaaaatcttgctgtcgggatgaagactccataggaggctaactcaaaacaactgggaaagtatagaacctagggaattagaagtcattttaaagcaagagtaacagatcctgtgtgaataaggagataacagcacttgttcagaaaccaatttagacactattttatgagaaatatacaacaatcagcaccaatcaactacactttaaaagtccagggcaccaaggaaatgtggggaaggttcatctggccatctccaggttcagagatgcttcctggaagagaagatgtgagagctgagcattagaggatgaccaggagttgatcagcacaagaactagaggaaaggcgttacaggcagagggaacagcatggatgacaaaggcatggagcagtcagacccacagagtacctggggactgggaagcagctgaaggcaacaaggggtcctgttgccagacccactcagtcttaaaaggcaaaataagcaccccctttcatctttccactgttgaaagtgaacaagtgatactctgtaacacaacctcattctcaaaaggctagatagattgctttctccctacccacagcttttctgagatttaattcacatataacatggtgtgagtgtaagatgttctgtgtgttgatttgatacacttgtatattgcaaagtgactaccagaacatacacttgtaactgcatgttagctagctaatacctgcatcacatcacataatgagtatttcttcttttgctgtgagaacattgaagatctactgtcttagcaaagatgggcttgataaaggacagaaatggtatggaattaacagaagcagaagatattaagaaaaggtggcaagaatacacagaagaactgtacaaaaaagagcttcatgacccagataatcatgatggtgtgatcactcacctagagccagacatcctggaatgtgaagtcaagtgggccttagaaagcatcactacaaacaaagctagtggaggtgatggaattccagttgagctatttcaaatcctgaaagatgatgctgtgaaagtgctgcactcaatatgccagcaaatttggaaaactcagcagtggccacaggactggaaaaggtcagttttcattccaatcccaaagaaaggcagtgccaaagaatgctcagactaccacacaatggccctcatcttacacgctagtaaagtaatggtcaaaattctccaagccaggcttcagtaatacgtgaaccgtgaacttccaaatgttcaagctggttttagaaaaggcagaggaaccagagatcaaattgccaacatccactggatcatcaaaacagcaagagagttccagaaaaacatctatttctgctttattgactatgccaaagcctttgactgtgtggatcacaataaactgtggaaaattctgagagagatgggaataccagaccacctgacctgcctcttgagaaacctatatgcaggtcaggaagcaccagttacaactggacagggaacaacagactggtttcaaataggaaaaggagtacgtcaaggctgtatattgtcaccccgcttatttaacttctatgcagagtacatcatgagaaacgctggctggaagaggcataagctggaatcaagattgccgggagaaatatcaatcacctcagatatgcagatgacaccacccttatggcagaaagcgaagaagaactaaaaagcctcttgaggaaagtgaaagaggagagtgaaaaagttggcttaaagctcaacattcagaaaactaagattatggcatccggtcccatcacttcatgggaaatagatggggaaagagtggaaacagtgtcagactttatttttttgggctccaaaatcactgcagatggtgactgcagccatgaaattaaaagatgcttactccttggaaggaaagttatgaccaacctagatagcatattgaaaagcagagatattaccttgccagcaaaggtccatctagtcaaggctatggtttttcctctggtcatgtatggatgtgagagttggactgtgaagaaagctgagagccgaagaattgatgcttttgaactgtggtgttggagaagactcttgagagtcccttggactgcaaggagatccaaccagtccattctaaaggagatcagtcctgggtgttcattgaaaggactgacgctaaagctgaaactccagtactttggccacctgatgcgaagagttgactcattggaaaagactctgatgctgggagggattgggggcaggaggagaaggggacgaccgaggatgagatggctggatggcatcactgactcgatggacatgagtttgagtgaactccgggagttggtgatggacagggaggcctggtgtgctgcaattcatggggtcgcaaagagtcggacacgactgagcaactgaactgaactgaactataatcactgtgctgtacattaggtttccagaacttattcttataaatgaaggtttgtaccctttaaccaagatctccctttcccccccacattacagcccctgctaactaccatttgggtgtaggttccacatataaaggagagtctgaacttgtctttctctgtctgacttatttcacttagcatgaatctttcacatgtccatccatatcaaaatatgtctctttaacatttattgttaagtgttgtctgaaaagaaaatggatttcatatacttcagttctttttttttttagtgggacaaaaattttctcattacaactgaccactttgaggagcattttttttttttaatggaaccaaaaaattctcccactctgagtgaccactttgacaagcatttttgggaagaacagagcctgatgtacagaagtgaggtcctgggaatgtaacagcctaactcaaactcttcctttacactttgttcaaagaggtgatctgagtttggagttacaaattctatttttttctagattccttctttctgtgacttaaatttatattttgaaatggtcatatagtaaaatagacttaagtgttttttgcattgaggtgaaattcatacaagccattttaaagtgaacaattcagtggcatttagtacattcacaatgtaatgcaaccaccagttcagcctagttgtaaaacatttcatcaccccgaaaagagaccctgtacccagtaagtagttgctccccatttccttcatcccccagcaactaccagtctgtgttctatctctgtagatttaaatattctgattatttaatgcaaacagaatcatatgaccttttgtgtctgtcttctgtcacttagcatcatgtttcaggggttcattcacactgtagcgtgtgtcagagcttcattcctttttacggctgaataatactccatttgtatgtataaaccactgcttgtgtatctgatcatccactggtgggcctttgggctgtttccaccttttggctattatgaatagtacttctatgaacttgtatatacagacgtttattctttttaaaaattttaacacatgtatatatccatataacgaccatcacaatcagtatacagtatagttccttcatcctccaagatcccttcatgctctccctttgaatggacaccctccttccactcccagctcctggcaaccactggtatgttctccagttttgtccttttaagaatatcctataaacggaatcatacagtatttaactctttcagactggtttcctttactcagtataattattctgagattcatccaagccatttaatgtgtcaatatttcacttcttttaaaaaaatggacatatttattttaatttagtttggaattagtatttcgtttgaagtatttattttatttagtttggagttgattaacagtgttgtgttagtttcagatatgatatgtagctaaagtgattcagttatacatatacatgcatgtattctttttcaaattttttcctgtttaggttattacagaatattgagcagagttccctgtgccatacagtaggtcttagtttgttatttttaatatagcagtgtgtacatgtccatcccaaattcctaatttatccctcccctttcccccctaatatgtataggtttgttctgtaagtctgtgaatctgtttctgttttataaataagttcatttatatcatttttaagattctgcatataagcaatatcatataatatttgtctttctctttctctgtctgtctctgactgacttcacttattatgtgtaattgccaggtccatccatggtgctgcaaatggcattatgtcattcttttttaatggctgagtagtaccccatcgtatatatgtaccacatcttctttatccattcacctgtcagtggacattgaggttgctttcatgtcttggctaccgccgtagccaagcactgtaatgaacatgggggtgcatgtatcctttcgaaccatacatatgaatagcatcctactgactggttgtgctagtttgtttatttatttacctgttgaggaacatttagattatgtccagtttttgttcattataaatagagctggcatacatgtttgtgtaaaagttttgttcgaacacagaatttcatttctcttgagcatttgcctgggtgtgggattgctaggttatatattaaatgtatgtttaactttataagaaactgccaaaccattttctgcaatggctataccgttctgcattccaccagcaatggataagaggtctggctgctctgtgttggtgctagccttaatattgtcagtatttaaaattttacctattctgaatagatgtctagagatatctaatcatggtttaattcacatttccctaatgactaatgatactgaacacctttgaatgtgtttacttatcatccatatattctcttgggtgaaatatctgttcgagtgttttgctcattttaaaattatattgttttcttattgttaaattttgagagttcttgttattctggattcaactcctttgtcaaatatgtgatttgctcttgatcttagcttgtttgttcattcttccaacagtgtcttttacagagcagaatactttgatttcagtgaagtccagcttgtcgatttaaaattttattgttgtgctttttagtatcatgtgtaagaaccttgtgcatagccctggttatgaagattctctcctatataccagattttgcatttaggcctgtggtccattttcagttaatttttgcacgtggttttatgtttagggcaaaggttatttgtttttgcatacggatgtccaaatgtttcaacaccatttattgaaaagattttttttttcctctgttgaattgtgcttgcacttttgtcaaaatcaactggtggtgtttgtgtgggtctctttctgaactctctattctgttccattgatttataaaccagttcctttgccagtaccacaatatcttcatcactatagttttgtagtaattctttaaattcagtgatatgattcctccaaacttttcaaaattgcttttagctattctaatgattttccacatacactttcactataggtaatcttatagctatgaaaattcctcctgggagcaaattaatttttgaaaggcatttgttttggttttgaatagttttggaaaggagagagtgaaaataaaataagtctatttttgtttcacacaaaattaatgaaattattagattagagatttcattctattacaaattcttcctctatgtaaagtgctcagttttagtgaaatggttggctgtaagtcagagaaattgagcagagtcatgtctacatgagagataaactttgaaacaccacatatgtttaacctgctttttgaattggtcacgcaacactcagaatcagtttcagtctcaaggaaagcatacgtaaaacatttaatgtatgttcatgaagaacaggtcaacctgcccttggcttgtgtatcatttatttaatttatacagttttaggcctttgggtcctttcaaaacatttgcaaatgtgcaacattatagggtttccaggcaagtgttcttcacgtgaattaaaaactagaacaccaggaactcaggaagggaagtagaagctaggaagttttgttttctttttctgctttgaaggaagaaagaaattcaccccccgccccattttagaagaggattcttagaaagatgtcacaatcttcttggcaacttttccttagagtctagaacttcattgcaaaattccggtgaactttgattgccatgtccttatgttttatacagaatgatatgtatgccaggtattagtgtgtttgtcctatccattttctaacacttagaataaaatgaacatttaacacttataaagttaatgtgagcattatgaaagtgagctttataattaaggattcaacacactaatacctggcgtacaggtagaaggttggttttttgagggatgctgttaaaatcaattatcttgaaactcttggcagctcattatgtgcataccaggtctgccaaaatagttcagtttgttgatctaaattttggaagctttgtgttaaagtctgcttatttcaagttactctttaaaaactgtatattgagatgaatatccaaggttaaattttatcagttaagtaattttagaaattttacattgagaagtgagggatgtggctacttgtgtcattctaatcaaaccaagtctgggtggctcttgctaatggtctcttacattgagagcatcatttttaaattttgtgtttccagaaatactttcttcgttcctcaaccaagaccttattgtgttgaaacatagctacaggtaaatgaacattagttctttgatttcttagttaaagactagataggcatgtagttcagtgaaactaacacagttcagcaaataattataatgctttatttctctgcagttcttttacgtgtagtttttgtttgctacttcatattgtgacgtgctgcagaatggcatggctttccccccctcagagatgaaagtgagcctcagagaagtggttgatctgaagtcattgagctaggagtacgtagcagaatcagcctgaaaacctcattctcctgaggccattttacttttagataaattcctattgtatatctgttagaaaagggagagaatgactccagaatactgcagttcagattctatggcaaaagttatttgatatcttttgagtttttccattaaaactaaaaggacaaaaatgctgaattctgtagcaccagctctggctttgaagtattttaaaaaacataggcatttgtatttttctttctctaaacacaatcagtgttacttcccagtggattttctctgtttggactagtagttataaacccttgtattttgatattcttaatagatgttgattggtataatgctatgcgaggtctttatatttgatatatcacatagtacctgcaaagtgcttatttgttttgtacagtcttttggtcttaaccttttgatctagatataaaacaggcagaagcaatgtaattcctgcctttaatgtaatatgatgacaggaatcagcaatgtccattttagaatgtatcaggaagtggggaatgggcttattcaacaatgatgttgtgttggatacattgtgttggttgctgccctgtgtgtgtgcttgtgcacacgtgtgagtattcatttagaaacagtaagaataggttcttcctttcccaataagccattcttggaaggtagatctcagcagctgtagatgagataaaatatagaataaattaggtttaggaaaatttaaaactttaagattaattttttgaaaaaggaacccattgaggtgcaaatctgcaggaagaatttttctcattctagtttccttgttgaggtcagtctagtggctcacttcacagaatgcctcagggtttgagatttttatagtgtgtataaaatcagtgccatgcactcaatcctagatctgacccaagagactaagacccagggggaaaatatctcagcattaccaataagagaactacttttttttttttttaagaactaaattgcagatccacacttcagaaagatagggtcggtacccagtaaaacagattaaaaagaatcctccatctgccccaaatattctctaattgcaaacaatatgcaagggttaggaatcaagtccaaaggttaaaggttcttgctggcaagtgaaagagggaggaaagaggtatattgatgcatgtcagtttccagattctggggtcaagctattgtacctaaaaggaacaaggcatcttcagaaaaagtgtgattatcaaacaacaggtcaaagtttatctctaggtcaatgaaaagggtggggggagggtcatcattcagattctgaatataagctttgtatttaaatttgtgacaggctattcaatattttacaaaattaacctatttggtttattaaatgtcttttaataatgaaatcagaaaaattgttctcataataaatatgaagtaataataataagcctcacatacattatataatttaatcatcaaaagaatgctatgaggtatatattattattcccactttgtagatgaaataattgaaacacttcttctaaggtcatttatgttaagagtcactcagttgtgtccgactctttgcaaccccatggactgtagcctgccaggttcctctgcctatgggattctccagacaagaatcctggagtgggttgccattcccttctccaggggatcttcccaactcagggattaaactcaggtttcctgcattgcaggcagattctttactgtctgagccaccaggaaagccccaaggtcataggggcatgtaaatatactgttctttccgccactgtagttctccccccaaaactgaatggtgtgatattgatttagtcctaatttgattcatcataaaatacaaatgttcttgagcgcacttggttttaggagggaaaatgtctctcaaatattcctcttccttgaagcggttctttttttcttctcatttctctagaagggtttgctgtccatatcggtccaaagccccttttgccctctgcctggacattgcccggccagttctggtggtgactctgagccgggatcgcacagggatgctggcagtggcggcggctggcagtggtggcggccggcactggcaacagtgcagggaggccccacagacacaaaagcctctggaggcccggcctcccaacgtctgtgctgctcgcagatgctaatggcccttcgcccctcaggagcccttcttgtttggtttagaaaaatatttcaggagggtatttggaccagtgattacaggcaatctgatcagcattcaaaaagatcaaccgagacagttagttgataatgattattttttttcttcactaaaggaaggatgtttttgaaccaatgtctgggaaatagtttcccagtggaagctactgagagcagaagtctccataattagagtggtaaaacctacaatagtaattaaaacaattcacagactaagctggttttaatttttctggtagctgtggaggcggaaagcaattgttctagcaaattactaatgcttaaaacataaaagcctattattaattggctgtttagttgtataagtaaaaagtaaagggaaacagtgtacaccttgaattaccatgacctcatagcatcaatagtcaggcagagagtgtgaggaattagatattatctcaaggtctaaaaatgctgagccctttagtcaacaaacttttttgtgtttccttgttaagagaaagcacatgtagacagatgaagcaaaatatatatctacatgggagttttttttcccccccatttggtagtttttgcgcaccaaaaaaaggagcctgtgttatggtgtacctgtgtgtgtccattctgtgaatattctctagatttaaccagcaggccatacctaatattcaactatcagtagttatttatactgcttccagtttgcctcattaaacaaaactacctcacaattgcagagtccacttctccctttcagattgaactgaagtttagagctgtgtggccacatctgtacctttcaaggtggagtccgtctagggatcgtgcagcatttcataatggagagggaaccagtccatcaaattccacgcctgttttccgaggtggagtcaagttacggtccctgaaacaagttgcctcgttgaagcccaacttaaagagttccatattcatattcactttatgattttttaggaaaagaaaatttaaaagataattcgtttaaacagcgccgttgcatacagtatttaattttgtattcatgagaaaaatgagacttccaggctactagaaaagaaaagttaattccttgcagtagagaaatcaaagcgcagtttccgattctcccaggcggagggcctggaggaggttagggggtctttgtgcccgggggattgtctcagtgggagtagagggggagagggagagatcaggaagtgcctgcctcggtgcgagcccgagggatcaaggagggaccgcagggggctctgagtgttagctgcgcgaggaggtcctgcttggatcaaggcatcttccaggcaacgatgagcaaagtcctccggggctggttgaagggaaagaatggttttctgtgagcagagaaaagtacttcgtggaaactccgaaaacacttaagagcactgcctcctggaatgtgattgattccagcacactcctaatcccagaagaaaaaaaaaaaaagaaagcccaggagctcagaggcttcccagggcagggtcgggctcaaaccatagagaagaagttgctcattctcaagggtgggatctcacagccaccagcaaagagtgcaacagactggccttgttattgctgctcaaggctggaactttccttaagggtacttgtgcgccttgggagaccccacgctccccatcagctctccgcagagttctagggcgctcctgttgggtgctttatgtgtaattagaaattccatcatcacaacaccatgcaaaataggaattattgcccctgttttacacttgagttccctggggtggcagcggggggaggttaaataactgctggcagccacactgctgggaaaatggcagtttcaggatttaactccatgtgcgttttactctgaaacctagcctggtggtctaacttcacagaaactaagagtcatacatagagaacatgagttaatactttaaaaaaaattctcagaactttgactggtacggtaagtgctagataagtgttaatattattataattgatttctgggcttcttgcataagagaatatttctgggaccatcttcaagtgattttgattttgcatatgtggagtggggctcagaaatcatcatttttaacaaacatgttgggtgattctgatgcttatactggtagatgacgtgcatgatatccccatttaatagcagtgctaagactttatctggagtaggaagaggcaacccactccagtattcttgcctggaaaattccatggacagaggagcctggtgggtcacagtccatggggttgcagagtcagacacaactgagtgactgagcattaaggcttaattacctaatggggcctctccagctaggaggtcctccttctatcttccttgaccatatttaggcagggcaggcacttcctatctcataacctcaagagtaggttcccatcacacaagctaactcattttcagtattaaaatcagatcccatgacttacatgtttgaacaccacacattccctctttcctcagtgaaatttgtgagtttggctattgaacaaaatctctaattctgttaatgttgcaatttgcccaactggctaaattgagaataggaagtttaatagtaaatctcaagtatatgataaatgcatgttgatataaactgagatgtttgacatgcatacactgtaaggtgacatgaaaataatatgaaaaaagatctcagagatctccaagtggtctcagccagccacaatactttcttacatcctaaataaacatggccttgatggagacataagtttgagggcagaccctgagatgggtctcagagatgccttcgtgataaaataatacactgagactatgggaaacccagatttccaaaggtcttctgggatatctaagagaccctgactttcagaccttctgagtaaccatatatgtctgaagtattgacagtacttatggtggggcgatgtatgtcagaagagacaaacatatttcagtaaaacaaaattgaaatgtaagatgagaaaagactgacaaaatataaagtgaaaaaagaccgtgacagctacttaccacaccaccacccccaaccaggcaaataatatatccactgaacacaaagtgggattagaagtccaactattatttggtaaaccatctaatatatctgactgaaaacttaaactccaataaaaaaattgcaattgacatttcctggaggttggatgtcagattcttaaaaatttgatatttgcttaaactctgagctttgttctgttcacttttctgcatgtactgctttgcatagacctggacctagagtaggcactaaataaacatttggtgaataaataaatgaggaattagagaaaaaatttgtgatgaggttatttaaaatttcagtctctttttactggaaaggaaaacatatgtccaaacgtgtgtatgggtagattatgtcctattgtctggactctggttatatctttgccaacttgttttattgctctttctggtggtgcatcatttagggttatttgtataaataaggccttgattagcattaaaatttggatcctgaatcacagcctagaatgtctttagtgtttgagaaagttagcacactaatgtaaaccaggatacatagtttatacttgaaaatgataacttttattttacgtttctacagtcctctacatttttcaaggtttattcatacttctgtaaatctgtttttttcttgttcatacttctgtaaatctgtggactttttatgactccttaacagatggcatatctaagaatgatacaatttagacaactgtttgtccaactgaaggtctggattgagaatacaatcctagaggtagaatactagttctttcttttatgttatttttaacttccttgtttaccaaataggtaaatttgctgcgttggtggtggccacttagataaaaaagatgagagtggtgtgtggggcatcagggcatagtactggggagtcaggcgacaagtatggttctaggtcactgagttcatggtacaaatctaaagtcaaagccaaggtgaacattaagctaaagtaaccatagcagcaagacttgagaccacctgggaaactgttgtcccattaaaagaatttctccattttctatctctttgcaaatggagtaataactttggttttgggtgtaattcatgaattaggtttggcactcaactctgtaaagctgagtaacatcacatgagacctgggctttcatggggaaaaaaatctgctgcaactctggcttcattcatgcctggagataggggaatgacagcagtgggagacaggatgagaagccatccacccacagtgcaaagggagtggggcttgaattaggctatggaaaaatgagagtgtgggctttgtattttgcctacccccgggaaatgagagtggcggtgggtttggatggtaatagggcatgtgaagaagaaatttggcacagaattcataaatatgagcatctgtatgagaaaattattatatcaaacctacttccactccatactacttaagtaactctttctgtgcttcagatttttcacccataaagtgcagaatagtcttcatttgcagattagatgaacaaaagcaagtaaaaatgttttacacagtactaggagcatagtaagtactcataaaatgttggctattgcctagatcaggtactgttgtatagacctttatctaataaaagattgtatagtgaatatttttggttctgtggactactggtctctgtcacaactttgtagcatgtagccatgttctctgtgctgtcacttcagtcatgtctgactctttgtgaccccactgtagccctccaggctcctttgtccatgggagccactttcttctccaagcatgtagccataaaaatacataaatgaatagatgtgggtatgtgctaaagaagagaggcgaaaagaaaaggagaaaaggaaagatataagcatctgaatgcagagttccaaagaatagcaagaagagataagaatgccttcttcagcgatcaatgcaaagaaatagacgaaaagaacagaatgggaaagactagagatctcttcaagaaaattagagataccaagggaacatttcatgcaaagatgggctcgataaaggacagaaatggtatggacctaacagaagcagaagatattaagaagaggtggcaagaatacacagaagaactatacaaaaaagatcttcacgacccagataatcgcaatggtgtgatcaatcatctagagccagacatcctggaatgtgaggtcaagtgggccttagaaaacatcactatgaacaaagctagtggagatgatggaattccagttgagctctttcaaatcctgaaagatgatgctgtgaaagtgctccactcaatatgccagttggaaaactcagcagtggccacaggactggaaaaggtcagttttcattccaatcccaaagaaaggcaatgccaaagaatgctcaaactaccgcacaattgcactcatctcacatgctagtaaagtaatgctcaaaattctccaagccaggcttcagcaatacatgaactgtgaacttcttgatgttcaagctggttttagaaaaggcagaggaaccagagatcaaattgcaacatccactggatcatcgaaaaagcaagagagttcgagaaaaacatctatttctgctttattgactatgccaaagcctttgactgtgtggatcacaataaactgtagaaaattctgagagagatgggaataccagaccacctgatctggctcttgagaaatctatgcaggtcaggaagcaacagttaggactggacatggaacaacagactggttccaaataggaaaaggagtttgtcaaggctgtatattgtcaccctgcttatttaacttctatgcagagtacatcatgagaaacgctgggctggaagaaacacaagctggaatcaagattgccgggagaaatatcaataacctcagatatgcagatgacaccacccttatggcagaaagtgaagaggaactaaaaagcctcttcatgaaagtggagagtgaaaaagttggcttaaagctcaacattcagaaaactaagatcatggcatctggtcccatcacttcatgggaaatagatggggaaacagtggaaacagtggctgactttatttttgggggctccaaaatcactgcagatggtgattgcagccataaaattaaaagatgcttactccttggaagaaaagttatgaccaacctagatagtatattcaaaagcagagacattactttactgactaaggtccatctagtcaaggctatggtttttcctgtggtcatgtatggatgtgagagttggactgtgaagaaggctgagcgccgaagaattgatgcttttgaactgtggtgttggagaagagtcttgagagtcccttggactgcaaggagatctaaccaatccattctgaaggagatcagccctaggatttctttagaaggaatgatgctaaagctgaaactccagaactttggccacctcatgcgaagagttgactcattggaaaagactctgatgctgggagggattgggggcaggaggagaaggggacgacagaggatgagatggctggatggcatcactgactcaatggacgtgagtctgagtgaactcccggagttggtgatggacagggaggcctgacgtgctgcgattcatggggtcggaaagagtcagacacgactgagcgactgaactgaactgaactgatgtgccaataaactttatttatggacactaatatttcatttattttcttggtctccaaagtcactgtagatggtgactgcagccatgaaattaaaagacacttggtccttggaagaaaagctatgacaaacttagacagcatattaaaaagcagagacattactttgcagacaaggtccacatagtcaaagctatggttcttccagtagtcatgtatggatatgagtcggactataaagaagggtgagtgctgaagaattgatgcttttgaactgtggtgttggagaagactcttgagagttccttggactgcaaggagatccaaccagtccatcctaaaggagatcagtcctgggtgttcgttggaaggactgacgttgaagctgaagctctaatacttttggttacctgatggggaaaactgactctttagaaaagaccctgatgctgggaaacattgaagacaggaggagaagggtatgacagagaatgaggtggttggatggcatcactgacttgatggacataagtttgagcaagctttgggagttggtgttggacacggaaggctggtgtgctggagtccatggggtctcaaagtgtcagacatgactgagcaactgaactgaatatttcatttagttttcatgtactgatgttattcgttttataatttttttcaactatttaagagtgtaaacaccatccccaggtcacaggacatacaaggacaggcagtgggtcatgtttagctgacctcttctatagaccttcacatcttcagtttggaagtcttatttgcctagtaagcttccctggtggctcagatggtaaagaatctgcttgtgatgcaggatacctgagtttgatccctgggttgggaagatcccttggaggagagcgtggcaactccctccagtattcttgcttggagaatccctgtggacagagaggagcctggcgggctatagtccatggggttgcacagagttggacatgactggcgaccgagcacagcacagcacagggccacctctgtgcttgtggagatgcccattattagagttctgttggccgcttctggttctgctgcaaagcatgtgatggggtgtcaacagtacttcctcattcactggagactggttatagccaccatgtggaacacttctaagagacaattgaagtgatggactaagtggtcctttaaatgcaaccatgcatttcttgggtagggacatgttccaggttctcaagatatttctttaaggtttgaaaacaaagcaaaatggcattctctatttgccatgagtttctctgcattctctgtggccttataactcagttatcatagtttatagaatgggttttgctcataggtgggggaagtggctgcccctgaagggtgattttactgggattgaggaagaaaccctatgtccccatgaaagactcaaggaagttcacaatcatgaatattggttgacttgtctgtccctgctgttttgggggtaaactgggcttcattgctgttgtttagggatgtttgcactgtattcatggtaagaagtgtggaaagagagtgtctttctttgttcattgcacttaaggactctggtttcatcaggggttcatgagcaaaagtagatttacagtgaagctaacttcagaacccctcttccaaatccttgcaaagggcccccaaactgtgtcctgtggtcttgcaactttgtgaaatgtgcaaaataacctagttttgtgggttatttctaaagaactccgcccttctaagctgtaaaagctttagactccacgaaacatggatctgcttcaggctctgtgtttgcaggctgggactgacttacacttttttggaaggtgagaagaaaaacacctttgttggtagataaggaggattctgggatttgtgagtaaatcttccttaaggcctcagactgaagaaaacgtagaagattttcttagggaaaagggcgtgaaactgagagaggaatgatattgttggtgttctcctgtgttcctcataccaccacctccagaaaaaaagaaaaatcaggatgtttgagaaaaagaagggcaagtgtcttaagctgatcagaaaagaacctcatatactcaacattttaaaatgcttcatatattgtctaatttgatactggctgataatgtttaatgctgcattatttgctataataatgatgatgaaatgctggtaatgatgatgataaaaatacatacgttacatgaatgttaccatttataaaacactttcatatactttctctcattggtaaccactgaggccaagaaagcatctctttatttatggtctttggatgcctccagaattaactgggatcctgtgcaaaattgagatggaatgttctctatgggctttttaattattctctacttgtgtgcatgtgtgcccaggtgttcagttgtgttcaactctctgcgaccccatggactgcagcccactgggctcctgtctcagtggagactactggagtccctggtgagactactggagcgggttgccatttcattctccagggatcttcctgactcagggactgaatccacatctcctgcattacaggcagattattttccactgagccaataggcaagcacctattatttccttattttgtgataaaaaccatgacacctgtcagtttctcttcttttgtgaattcttcagcattgggacagtcaaaataacctttgaactttgacacacaaagctgtttgcttctcttcaagtggcttctaatttttgcttgcaaaactgctcagctggcaagcaaagaacacagttccctcaaaacctactcttagtaaggcagtatttgcattcatcagctttgtctgtaaaaacatactactgacctctgactgtttgaccttttaaatggaaaagcaccactgggacacataattaaatttatacacattcaagggtgtgctcaatcagagaaatgtgtgattgtgaaaaagttgatctggaagtttagtcagtagttcagttaagaagggaaagtgctggcagaatggaaaagatgaagtgctcttgagtgcagagaaaggaggggtgtataggattggaaggttcagggaaggtttgtggaatggggttttgagtcctttgacatgggcagaaagggcattctaggtagaacagatagtgggttaaggtggaaaggtcaagatatggccaatccttcgtccattttggcaagtacatgggattcggggaagtaggtttgtttcagtcgattgaaacctttaaactccactcagtgaactcttcacagatactcatgtacacattcaatttcatgttaatgaatagttttctaatttttaaagctgatttactcaggaatatatgaatcattatttcttataaaaattggttattagtgcttggtatttgaataatcacattacttgagcaaagaaatttgagaatgatactaagaaatagatgatctagaaatcacttaaatgcatttttagagtgaagactggtgattatcttcttagtactgacacttctttggcttcctgagactttgggtccttttaaacactctgaatatcatcttcatttgaaaaacaagaataatttagaatttgaaaatctagatttgagatttaactctgccactaaaatggcagatgatagatggatcatttcatccatttgaagctcagttattattttatatgtaaggtaaagcatggtctgatgatttttaaagtgatttccagcttttaaatttctgtgttcagtagcacattttaatacaaaacaggagcatctctgggcttcccatgtggctctgtggtaaagaatccacctgccaagcaggagatgcaggtttgatccctgggttggaaagattccctggagaaggaaatgccaaactgctctagtatccttatctggaaaatcccatggagagaggagcctggtgggctacagtccttgaggtcataaagagtcagacatgactgggtgattgagcatgcacacaacacacacatgaacgtctctagcaaataattgaaaaaataaacaatattcctgatattttcctcctgtagtttacacgattagttacttggaacatcaccttccggtatcagctggttttcttctgtagccactgtctctccttatgcctgtcttattatacttagacattcacacacggatcctgctctggcttcttttaccaggaagaagaaagcattttaagggcctcctcttacttaattgaataatgattagaaatgaggatttgggaggctggttagtaagaacaaccatctctgatgtctcagactttcttaaaactgtggtttatttgttatgagagtagagagatgtatgagagtggcttctgtgcttgtttgaattaattatatcactgctttatgtgaatgcaatgtgagtacatgtcatttatctcgatcttcatatatagagatgggcagatgcttgtatttgtacattcaaatatatatacaagtatagatgagcaatggagaaggcgatggcaccccactccttgcctggaaagtctcatggacagaggagcctggtaggctgcggtccatggggttgcgaagagtcagacatgactgagcaatttccctttcactttcactttcatgcattggagaagaaaatggcaacccactccagtgttcttgcctggagaatctcagggacgggggagcctggtgggctgctgtctgtggggtcacacagagtcggacacgactgaagtgacttagcagcagtagcagcatagatgagcaaattggaagaaccctatgtaatctcagagctgaattgaaattttcatttatcagcagtactaccaaacagttttgttgttattactaaaacaacagagacaaattcactttaatacttgctggaggaaagaattttatttactttttaattgtgtagctaatcaagagaaaggttttaaaaacttatattttgttaatagtatacaggggacaaaagaatggaaagaaacaccataaaggagtttgactaattcatctctctctcttgatccatctatccatctatgcctccatgcatccatccatccatttatataatctattccctaatttaaagtcaatagtgattattttgaattctggaactatagttgttttttaatttttatatactgctcaaattttagtttgtaatgtgtttttataatgtaaagacaaaaatatacaacaaaataagaaatgtattttgtccaggaaacactttttaagaataaacttagaattgggtgatgaggagtagggcttcagtccagttcagttcagttcaatcgcttagtcgtgtctgactctttgcgaccccatgaactgcagcatgccaggcctccctgtccattaccaactcctggagttcactcaaactcacatccatcgagtcggtgatgccatccagccatctcatccttggtcgtccccttttcctcctgcccctaatccctcccagcatcagggtcttttccaaatgagtcaactcttcacatgaggtggccagggtactggagtttcacctttagcatcattccttccaaagaacacccaggggtgatctcctttagaatggactggttggatctccttgcagtccaagggactctcaagagtcttcttcaacaccacagttcaaaaacatcaattcttcggacccagctttcttcacagtccaactctcacatccatacatgactactgggaaaaccatagccttgactagacggacctttgttggcaaagtaatgtctctgctttttaatatgctatttaggttcagtttgaactgaattggctacatagtttttagatgttggcattatactgacatgtcaatgggataatttctggttacattattggttggtgtgggtaggaaggatgagtatgactatctttggtccatccaggtcatgcaggatccttaatttattcaaagctgccaaagataaagacacatatttagacccttaacactgaacccctcagatcaggcattcctaactcaacaagacatgtcatcagagccactggagaaaggagtgcctggggtcagccctctaattctaaaatcacttattgtgttattactctttgtaagaaaggggaccctcttctgttctttcctcttctctcctcccctcccttactctgtcctacctagtacttccattctttccctttcagctctgcaagataattcctggaaagagaatgtcgagaggaaatgcagttgcccaaaaatttacctggaagcctgcttttgaaggagttcttcattttatttctcctggagatgggagcctgacctatttcatattggccagggacactaaaatgagcagatagagaattgctcaaagctatacttcattttacctatgttgattcatatcaatagacaaaatgaagaagagaatttgcctgtggaaattcttccccatggaaaccaaaatgaatgttggcacagagtagaggccaagtgtccttcatttattttaggctgtttgctggatgtttattaagatcagccctcttgcttaagccctgaggtatttgggagcacagaatttatttactgtcatagctaccttaatctttgattccacagcacagatgcatgtctgggccaggaggagcagagtgcactgggttacattttaaatattttacaaattaatttttaccagagtacagttgcgttactgtgttgtattagtttctactgttatcgcaaaatgaatcggccatacctatacatataggccctctcttccggatttccatcccattcaggtcacttagtgccttaagcagagttccctgtgctatatagtaggttctcattcagagctgaacatccttttaaagcagatacatatatactagctggttgtgggcaggatcttcagaagagaagcagatgggagactggatgatgatcttatatcataaactcaggaaattctacaaacatcttcgaagttttggtgatcatttttctccttcagttagaacatagtatttttctcatgctaatttttttttttttaatgctcggtgggggttggataatatgaaggtgaaggtatgcagagggctgcatgtttggaggatctattgggcattgggagctgttgtgtgctttgcaaactcttctttccttaaaactcctctttcctttgaagcaggcatttaaaaaccacatttactaatgaaagaactgaatcagaggcttaagcagctggccccaaatcagagaggaagtggccaggtgggcgtttgaagcagactgacttttctctagaactggaggtcttttaccatagcttttttttttttttcccccactttgtttgctcaaacctttggtatcatctcttctgaactcagtgctgactgttggcttagatgtaaagaaaaatttcataaaccagccatccctatctaactaaggatagtgataaatcattcacattatctacttaatcatcttgactggtttgccagttcctcctggggttttggtgggataggacaccaatctggaaaccaaccttccaaggctgagcatcatacctttgcaggatgaaggagagaaaccccactctcttctttattatccctttcgtcccagcctctggcaaagtactacttgcacagtaggtttctcatgagtgctttctgatggtgaccttgatgttgctactaatgcttttgccagcgagaattaagctcagcctccctcttttgcctccaggaaaagtttcctctttcatttatattcagttattacctcttcctatcttccaacaagcagtaattgacccagataagatttggattttctaaacaagcttcctgcgctcttttcttcattatggaagccggcagaaaacgaaaagcaaagaaacaatcttgaaatgccatatgggaggtgtcacttaaagcatttatgtattaatttgatctctatattaaagatcacaggcgcacagaatctatggctctgttatttagtaaataatgtatctgggtttttcagccttgagagaccacttaatctttctgttgccttggggcatggctgaattaccttccgtatatactgatacaggacttggattcagtggaaagagcactggagtgggagttaggcgatttaagttttactttctgagtttaagcaccatacttgcatccccagtgccaaggacagtatcagccaaatcttaggctttcagtaaatgtttactgaaagatgtgtgatttgaggcaacccctcttgctctctctaagcttcagctgcagaatgaaaggattgtcctaaagtttcttccgaagattctgtaattctgtaagtgttttgttctgtatttcaaatctcttagtcatttatcttcttatacctcctttggtaggtttctggcaccaaaagtgcagcatttaactttcttcttaaacctgcctttcttctcttttccaaacatctccagtcatactaatcctgacaaagtttggttgtttaggttttgtgtgtgtctaggttatcttgtcttaataagagtggcaaaagcgttcttttgttttctgccctctcaaaggctctctgtgtagcttgtcacctcttttatatattcaaccttagtttatttgttgacttttaaatgaccaatgcacattatagcaaaaatatgcaatcgtggaaaataaaggcagggtgattctttgtcaattgtgctttatttaaagctctgtaaatatggctaaggtttgggtttcataggcagaattctttcttagtgactgcacgtaacataatttcacatacaccaaccaccatggaaaatatcactcaccttttatggtcatgttttcacaacgaatttatagagttgactgtgaccaggaaggaaaaaatgtgtcgatattggccagtctttttctcagcccacctcattggttgaaccaacgtactccttaaaagacaatgctaataaaaccgtatatttgatatataagatctaacatttaggcagcttctcttagttctcatggatcaggtaggttacaggactcttgagatgtcgttttttctcatctataggatggggatgacagtactcatatggggtttcgggaactttgaaagaacatgcatataaagaatgccagaagcagagatgtcagcaaatcagtgaataacagcttttaaaaaatatccttattattattattattgagttggttttgcccagaacgttgaagaaacgatcacaagaaggtctttgagagatccatgttctgcctctagttaaccagtttacacagaaatgatttcagaattaaattgttctacattgcagtggatgaaccacacttggaccaaaaaatgtggtttcaattcagatacaggaacagaaacataacctaaatctcctcataaagagagtgttttgtgacatggtttttctttccctattaaagaaatatttttccataggaggaaaggaaggtgagtatgtttgggagagtaaaggggcttgacacaattatttcttaaactgatatcactggttatattaatagtaagcaacccagaatgagagcatttctaatattttacaattctgaatgaataaggtgtaagtggaagaaagagatgtaattaccatagagaacacaatcttctgtttcattgggtttatttttttttccattcatgacatcttagaaatgcatagttaaccctgagagatgaaaaatgcctattgttctttcgaattgtttgctgtgtccagcttttctttcctgactcaattctgttgaatacttacgagttgtcacatttttagtaagtaataactgtgtcaagctgtgatgacaaaatatcccaacataactgttaataagcattgtcattttaagcatgaaacagtttagccaatgatttatctcttataatgcagcacttggggcagctgtatgatttgtctctttagcaagtcaagtaatttctttaacaaaatgttaagcacagatgggccataagctgtcagttaactattattgtgtctgcatctgcttgctttcaatgcactgttttatgtattcagtcagttacttagctgcggctctgtgaaaagctgaacctactctgattggcaaataaaatgttcatttgtctcttcttcctattgttttgttttggtaacacatgtcagcagctcaattacccagttcattaacagctcccaaaggacacgatggccagcccgtgataagagggcaattgtggcacatatggtcaataatggcctctctcttggcaattgtaaataaaagtcacttggcccttttcctttcaccagaactactgttttcctgttccccttcagtgtgcaaattacctttctttgctccctgcaatccaatcccagtaaagcaaaacctagtttactgtttttttgagactcagagacttcagcagacagggagttctggctcttaattttaattatgagtgacttttaagctcttgagggaggaaagttcttatcaagggagactattcttagaaagctgttagctgattaattagttaactaatcagttttcctaattgaatagcaacacattttcttggggcttttatctcttttcctctttgaaatactctggtggctgaaatactctggttaccacagaatttaaagaggcaatttattaataaaaccaaaatgtgccagtagaaatcatttgcaggggcagataggtgtgacttcatctttgttccatgagagagattcatttccttccagaattcttgttccaggtaagtctcaaaataaagggtttaagaagccactgggttcatctgagtcactgtcagagtcccccaaaccagttaaggattccttcttcctttttatacctttggaaggagatgctgaaacagttcctttggagttttgtggctcctttaagcaaaatgttgcttgtgtcaggggaaaagaaagggcagaagcctgtttttacttcaacatatcaaggaatacaaaataatcatttctaaagttcctaaaaataatccctagcagggctgagatggatgagagataataaacctgtgtttttacaaaagaggccttttaagcgactcatggtcaggtagtggctgtgagaagagcgctccacccccaatacgtttccttagtgtaaagtggatggagacctcacgcgcacatgaaattcagcgctattggaacctcaggatgggtggggagggggtcttgggggccatgcagctcaatgtttcggagacaactaggctgtacagccagcctctgcttcgcagtccttatcttacacaaacacccaatggtgcacgttgtccttttcaagtcactcccgggtccggagcacacgcggcccttctgggctgcccccgcggccggccatattcataaccaatctgtacactcctcccagggcagcggggactccgggagttgttgagtgtcagggtttatttgtgctattttgattagcaccaacctggcaggagcttattttccttctaatgaccccgtgctgtgagaaggcagcttccgagggaagggcttgggtcagaggggaggggaccggcattacgtttctgcagcccccaagtgggggtggggggcgctgctctgcgggaacaagggtaggtgaagggctggagggtcttaattatattgagagtttctaaaagaacctttccgagagagcccagaatatccttcccataaactgtcctgcctttttttttttttttttggtaattgctaaagatttttgggctggctggcacattttgtgggagaaattgtagtggctgtaaaagcaaaacaagacccctacccgcccatctaccccacgaggccgctgatcaggttataaaccaaaccgtctctcctagtttatcaacgaacacagtcagaattacacaaattctagttctgaattaggaattctagaaagttcgagaatttgttaggtcacatacactggctagatcttagataccttaggattttattgtaaaactttggttcttttcagcggagtttttctctcgacgtatatacaattttaaaaattaaataaaatcgccgattactttttagcttgtgaattaatgtggaagagaagcttccaggtgctggagtctctcaactggcttggattaacccctactgtgcatccatttcaacctccccctcctcccgcctctggaaaaaaaaaaaaaaagtacccaacctcccctttctcatccactccggctttctttgtgtctgctgctccctgccaggcaggtgtcagagccctgaatgagggtaaacgctccgctgatggattccacagatggagcgtggaaatcggtagaataggcctcggccacaggccatttctggggatccaacaaaagcctccaaataagtcaacaaaaatcccaaagatcacaaagggaaaatgtcatttgtcatttactctggggctgtgagggaatatcagactcttcctggctttcacccgagtaaacacgagagaggtcattcacatctctcagtgtaaaaaggaccacttcagatcagaaaacagttagttgtcccattgtctcctcctgtgttgaatagtgaaacaaacacacgagaggtacgattggatgccaaataagtgcatccaacttcaagttgacccgttaaagatctcatgggatataccctctgaaataccggttcagtgtcgaacacaaggtgaaaccacctcgtggggctttcaggaaccatttttatttttctcttcttcttttgtcagtgaaacacagatttgaggaccggtgctgacaggtttagctccaaaaggttagtacagataccaggaccgtgtgattcagtctgaggccgtctaagaagaaatgaccaatgaccaaggaagttcaccctcaaaacctgcagggcctcctctcatgcctgtaaatcgcgttgtattatatcaggggcaaacagagagtttaaatggttgtcacgttttgattccttaattattcaaatgaaaggtcttgctgagaagaaagacagtgtgccaaacgcattcttgtgagttattttgtttctccagtttttgcctgtctcccatctctgaattatactggtctggaaaccagtaattatagaaccccacgtgactaaatccctgtaaaattgaggtaagatctcatgtataatagcgttaactaggatgaaatatctcctgaggctacagaagaggtcacaaggggttaacggacaaagacatactctctaattctgtaattccttctttaattaaacgtcatggtcggtccactggtggtaagacttttgccttctcctcccagtttgtttctgaaggaagaatttgtaatcctgtggagtatgattgttgcctatgcgtgacctttttaatttttttaagctgaaaatacccgttttcccaaggttgtttttgggagttagtgtgagatcgttgggataacaaatttttgctcctaacacttagaattagcttgacatagaaaaagaagaaatgaacttctttcaaaattaagaataaaacacaaggttgaaatacttaggcacctggtgaaaggtgatattttcccagcaatcacactgaggtttctgctgaataacttgtgaatatcccaacagatttcaaatttttattcctgtcctttttgtcttaaaagaatttgaggttaccttatagctcttgatatcctttcatcagggtgcctttaatatataaaaaaaagaaggctttaatacagatataaactgagtgatcagttcaactgcttgtaatcaataatattttccagcttgatcctcgatcttaggaccaagggtctatgatgattattaatggggactgcaaatggtcagacaattttaatttcttaaattgattcaatatcttggaaaattgattagttttttagtgctttatttgaatatacaaagaactcaatgaatatttgttgaattcaattgatatatcaatttcccaattgaatttaattcaacaaatatttattgaattctttgtatattcaaagtatgggggcttccctggtagctcagatggtaaagaatctgcctgcagtgcagataatttgctttcaatccctgggttgggaagatcccctggagaagggaatggcaacccactccggtattcttgcctgcggaatcccaaggacagaggagcctggcaggctgtatatagtccatggggtcgcgaagagtcaggcatgactgaatgactaagattttcacactttcactttgaaactattgtatttctgtcgatttttgcttgagtctcagttttgaaaatttgagacaaatgaggatagtggtggcaatcagctaaatgatttatattggaattcctgacttcatgtgtttctggtattcctcttcaaaaggactgtgtgttatgcgtgtgtgtgtgtgtgtgtgtgtgtgtgtgtgtgtgtgtgtgtgtgagagagagagagagagagagagagagagagaaaggaactcaacacctatgtagggtgttccaggctacaagggagagttctctgaagtcctataaacctgggtcaagtcctagctcccagctgtgtgacctgaataacctctctgagtctttccatttcctgtgcaatggggtgagtatttactttacaggatgtttgtctagttacataaggaatggagagaaattctcaacctcttggtaagatttgttccaggttcattggggacattgagttaaactaatgtataaatcagagaatggattgtgaagaggttttggtaatagggtcaaaactttcaaagtctgataacatggattgggataaaatctgagaatttttatgcaatttaaaataataaaatttccacttaaaaaacattatgtattgatacggattttcttatgagaaccattgtggaatttccaactgggggacagtatctctaatgaatgataaaacaaactttgtgaaggcaggtatagaatgtgatagagcaacttaaatatgaacatctcccttcagtattaaggccagacagtagaagtagactgaagaaattatgtttaatctagttgctatatcctggcaatttatgaacatttagataaacgtcttgttaatgcagcttgtagtttcaaagtcatagcttaagtattctacacagaaaaaaatatatataatttctttctgtcaagctgtctgaaaaaaagtcttgtttttactttgctgtaatatttagcaaggttagaaacttggtgtctagtatctaatttgttccagttttgaacaaagttaaatatgtaaactagaacttcaatggaatgatttaacttgtgctatcaaaatgggatttaagttttagacttgtttttggtaaaaactgattcaaattcaggacattattgcgaaccatgtcctgtgagactaatacattttaattctgttgagtgatacaaaaaatggtagtatttctgtttttagaaagagctagtatttcctagcttgtagattaatctagggtggttcactgagcattttttaaagctcacatccctctggaattcacagatggggaaaagttagaattagcttgtaagactgtggcttcacagtgtcaaaaatgatcagtttgtttggatagttttccagcagaaaaatcaggcaaattgtttcctcagtgcctttgaaattatgctgtttggagtttttcctagttagatggaacctttcgattgcttttgaataactagtctagaaagaaaagtagtaatttgctaacttgttaaagaaaaatttatttttggtggtgaaggctgtcctattgaactctttgatattctgagtctttttcatcactggctattgatagttcctcaccgtttttaaaaaaaaatcctctctgaattgataattattcctcagaaaaaaattcaattgcattcaaatgcttgcaacaattttcaagtactttttaaggattcaaaacctccaccctcaaagctcatctaaatggtgggtgattcataagagcagaatttccattttaaagatctaaaatgatggcagagaagtaaattttagttcaaaacttaatttttctcctgtacttctagccattcagcatgtatttattgagcacatattatgtttcagcagtagttctagcaatgaacaaggcaaaggaagggacttgagctcacagagtttatattctgggagggctagaggtgggcaggtattaattgttaagttgaaacagtggtcttgaccctcacaattaactctggctggttcttgtacatctaagcagccatttttctccagaaactagcgatgattttgattaattgacctgacagtgcatggcacatcatatttacttgggaggatttaatagccccagagactcccaaaggaaacatgaaaatttccacatactattatcctaatgggatcagagtaagagaaagtgcaagcaaagatttaaagttctcacaggcagaggagagatttaggtcagttcttaaatgctgtcgagttttttacttgaattcacgttagacaaaaaagtcaaggcaacaaaaactgaaagcatggaaggaatacattttataaaaatttattttcttcttagggggatgagtaatttgtttcttgagtatattatttataattgaaggggcaagtaggggcaagttttggggtaaattgtggtggaaaatattttatatactcgggaattttgcaggggaagcaaatatctagtctggaatattctgtagagatggttctcaaagtgtgagtccaggatcagtaaaatcagcatcagtcaccagggaatgtcttagaaatgtgacttctcagagcccattctgtaccaatgaaatcagaggaagggacagccatctgagttttaataagtttatccagtggttctgatgctccagaggtttgagaaccactgccctacaatttggagaaggaaatggcaacccactccagtgttcttgcctggagaatcccagggacggcggagcctggtgagctgccatccatgggactgcacagagtcggacacgactgaagcgacttagcagcagcagcagccctacaattatgcgcaaattattattcttttaatttggtccacatttattaaaggtagacacgtgtaagttgtattggctgctttttaagtttagcacgcaatgtacaacgtattttttagcaagttaatgtttgtcgttcagttgctaagttgagtccgactcttggcgaccccatggactgtggcatgcagtcagcatgttaatactcctgtaaaatattcccatacttaaagaaagtctatttttctttctttcagttaatgcaaaaatatcctaaaataagatttatattaaattaaaccattttatattaaattagataacataattgaaaaaccaagcataatggccaacatacagtagagcattatataattaccttttgcttttatataccagaattggttttctttaatttgtcatatatattattgatttactttcttaatttcacagtatttgaatgtgaataaaatgtagaagtattaaaataaaagaaagcttagaattatatttatcagttcttttgtatgggtactattttggggcagattatagcttattctaaatttgaatgaaatttaaaatttccatggggcagaattaagttttgagctcaagagaaaagaaaactggtgttgtaggagatactacattttaagatcgcttctagcgccccttgcatttccccaagtcctccggcctgagggggcaaatgaaataccttgacattgtgtatgtctactcagtcatgtccagctgtttgcaactccatgaactgtagcccaccaggcttctctgtccatgggattttccctctagaatactggagtgggttgccatttccttctccagggaatcttcctgacccagggatcaaatgcatgtctttttcatctcctgcattggcaggtggattctttaccactgtgccacctgggaagctcattagtaatctacaattttctggctggcagcaaacataggccctttccccagaggatcccccagttgtttggggcattttctgagtgcatttggatatgttcaggagcacggtggctccggctcctgcgctgtgctcagagtttatggcctgacagccccctgacggcctctgccactgccctgaggcccaggactctgaaggaggactgctatcgtactgagaaccgctctgtgatgtgtcctcaaactgcagaacctgctgttggccaataggtgctcggttactgttacatgtcacacacaccaaattgcatcacgaatacgaatttatacttaatttcccagctcctgctcctctttcttaggcatctgcatactcagtttggaaggtcttccctgaacatgctcatacacagacaaattcaagctttggtggagggggctgcagcaaggctggcttcagggccatgtgacctattcaatcacccagggccccctgtgcagagaggggccctgtgcttagttttatgctctgttgttgccatcttgaaattcatgattaacttttgaacatcggagaaggcaatggcaccccactccagtactctggcctggaaaatcccatgggcggaggagtctggtaggctgcagtccttggggttgtgaagagtcagacacgactgagcaacttcactttcacttttcactttcatgcactggagaaggaaatggcaacccactccagtgttcttgccaggagaatcccagggacaggggagcctggtgggctgccatctatggggtcacacagagtcagacacgactgatgtgactttagggtcctgtattttcatttttgcactggattcctcaagttagagtactggtatcactctatttttttaaattttttaaaacttggctagtggattgtttactggtttatccactaagtctctcagtcatatccgactttttgcgaccccgtgggcagtataggctgccaggctcctctgtccatggggttctccaggcaagaatactggactgagttgccgttcccttctccaggggatcttcctgatccagggatagaacccatctctgcactacaggcagattctttactgtcagtttatgcctcaaattaggcagccgttctgagcagctgcctatccattcagcagagatccagattctgaatctctgtttagaaacaattcactagactctgcctgtttcttcctgcgtctgttcttgagacttacattaagaatatctaaactccccttaaagcatttcttaatatctggcaatgagatagtaaatttaacatggtttttcttataaggagtggtcagtttagttcagttcagtcactcagttgtgtccgactctttgcgaccccatgaatcgcagcatgccaggcctccctgtccatcaccaactctcggagtccacccaaacacatgtccatcgagtcagagatgccatccagccatctcatcctctggcatccccttctcctcccccttctcctcctgccttcaatctttcccagcatcagggtcttttcaaatgagtcagctcttcgcatgaggtggccaaagtattggagtttcagcttcaacatcagtccttccaatgaacacccaagactgatctcctttagaatggactggttggatctccttgcagtccaaggggctctcaagagtcttctcgaacaccacagttaagaagcatcaattctttggcactcagctttctttgtagtccaactctcacatccatacatgaccactggaaaaaccatagccttgactagacagacctttgttggcaaagtaatgtctctgctttttaatatgctgtctaggttggtcataactttccttccaaggagtaagtgtcttttaatttcatggctgcagtcaccatctgcagtgattttggagcccaaaaaaataaagtctgacactgtatccactgtttccccatctatttgccatgaagtgatgggaccagatgccatgatcttcgttttctgaatgttgaactttaagccaactttttcactctcctctttcatcttcatcaagaggctctttagttcttcttcattttctgccataagagtggtgtcatctgcatatctgaggtgattgatatttctcctggcaatcttgattccagcttgtgcttcctccagcccagcgtttctcatgatgtacttattctgcatagaagttaaataagcagggtgacaatatacagccttgacgtactccttttcctacttggaaccagtctgttgttccatgtccagtcctaactgttgcttcctgacctgcatacagattcctcaggaggcaggtcaggtggtctggtattcccatctctctcagaatttttcacagtttattgtgatccacacagtcaaaggctttggcatagtcaagaaagcagaaatagatgtttttctggaactctctttctcgatgatccagcggatgttggcaattttatttctggttcctctgccttttctaaaaccagcttgaacatctagaagttcatggttcacatattgctaaagcctggcttggagaattttgagcattactttactagcgtgtaagatgagtgcaattgtgtggtagtttgagcattctttggcattgcctttctttgagattggaatgaaaactgaccttttccagtcctgtggccactgctgagttttccaaatttgctggcatattgagtgcagcactttcacagcatcatctttcaggatttgaaagagctcaactggaattccatcacctccactagctttgttcgtagtgatgctttccaaggcccacttgacctcatattccaggatgtctggctctaggtgagtgatcacaccatcattattatctgggtcatgaagatcttttttgtacagtcctctgtgtaatcttgccatctcttcttagtatcttcttcttaggttaggtccctatcatttctgtcctttattgagcccatctttgcataaaatattcccttcatatctctaattttcttgaagagatctctagtctttcccattctgttcttttcctctatttgcattgatctctgaggaaggctttcttatctctccttgctattctttggaactctgcattcagatggatatatctttcgctttcccctttgctttttgcttcccttcttttcacagctatttgtaaggcctcctcagacagccatttttcttttttgtatttctttttcttggggatggtcttgattcctgtctcctgtacaatgtcaataagactggtacagtccacaaatttataggattcttgtgatagtttactgttattgcctttttagatacaaagtcagttttggaatatttatttttaaaaatcactctttgacaaattttctcctggtctaaaagctggtgaaatttatcaggaaccaaattcaatgtgattcatattggacaagaaccaagtatccattaaatgctaaggctgaggggcagaaaaaatggaggcagcctctccttgctttttaagagcttgtaatgcacttagaatgacagatgcagagagcaattatttctgcctgggggagcctggagatggagttgcaaaagagattaaatactatttaatgtactcctgcaaggaggggcttggtgtccatgggttgactttggcagtgtactttagactaggagttgagtcattatatcttggtcatactttttttccccccatgttttggccccagcaagcggctttcaggatctcagttgcctgaccagggatcaaacctggaccctggcagtgacagtccagaatcctaaccattaggctagcagggaactccgtcgacttgtttgttgacacacattggatcacttcttttctcctgtgctttttagcctcggcaccccaatcagatgaaggctctgacatcgactctgaaccagacttgcccctcaagaggaaacagcgccggagccgcaccaccttcacagcagaacagcttgaagaactggagcgggcttttgagagaacccactatcctgatatttacaccagggaggaactggcccagagggcaaagcttacggaggcccgagtacaggtaccaacgtcccaacatcgcgtgctgcgtaaacccagacagggaacaagagcatcttcctctctaaggtgtacttcaaaccaagaaagcaactatgctaggaatggtccttcattgtgaatggtagcctctcacattctaaagttctccctttctgatttctttcctttacattttgccttgtcatgataacaatatcatgatctcttttttctttttatttgcacttgtgtggtccaaccacctcccaccactgctcctccccctcccccggcctctgccccctcacccgcccctgcccccttcctcaaggtatgtctgtgggatacagcaacattttactatgctaaccagtaagtcagaaaatgttctttttcctcttactagttcggtaagtccaattattgatatgatggctatatttggcttttctgtcacattgtttgatatgagtattttgtatgtattgatttaaaactgtgatctatttaattagctttctttctattcttagtatattttgtatttatgaaaatgtccgttcttattttagactttggtcgtcattacgaggagaatgtgttaataatcgtatcagatgtaatacagagaagaatgtcaattcgtgttactcacgcatcatttccgatatccttgttatgtaccagggaatgcatagatttggggggtggtacatggacaacaacgaagttttgagtggttgttgtgtgccaggcactgttctaaatgctttgtgtggattaactcatttacttatcattaagaccctaggttggtactatgaatatccccaatttatagatgaggaaacagactcagagcatttaagaaactacccaaagtcatgtagttagtaagtgatcacggtaattggatcccatatatttcttctctgtagccattcaatcatgaagaagtgcaaagttgcataaggtaaaatccttttctttaagtctagaagcttttcaagtaactgtattattttaagaacatgtaaaattaccttttcaacttagaagtgttctgaaccctggagaaaggctagtttggtgtaatttgtttctattgagtgatcaaataatatttcattatgaatgatgaacagtctccccaaggaagaaaagcactgctggaaagattaaagtgcttcagggtatcctggaattctttactggcccaggagttaaagtcaccttatccggaaatgtcatgttattcccagatacttgactttcatagtcagagtgagactgaggactcagcagcgaactaggcagttgatgtggtctctagattgattgacaccttcccctatgcatctgtctctcccatcacagattgttctggaatagcctcttatagtctgcagagccaagtcagattgcttttctcagcttgactttctatctgatcatcacagtgctggaaagtcaaggaacaccaagaagaatgaggacaaatttctcaaggaactagtgtttaatggggtaataaaaacacacaaataatttgaaagcaaagctgatatgataagtatattagagagagatgaagtgcagtgagagctgagaggaggaaaggtgtgagatcttgttggggtaaaaaagggggactcatgaagaagggagggttcagatggacttctgggtctagatagatattcagtgggcagggcaggtgggagagcattttagtaacacagaataatgagcagaagcacagagggctggacgcacacaagttacatgtcagatgaactttcattttcactctagtcatgttgaagaaacagtgaatagttcagtttggttaaatagagggagtggtagggtggcaggaaggaagctgattggaaatctgtttgctttctttgtattcttcctgtttttgttcagtcactaagtcttgtctgactctttgcaaccccatgaactacagcatgccagttcttcactagctcctggagtttgctcaaaatcacgttcattgaatcagggatgccatccaaccatctcatcctctgtcgcccgcttctcctcttgccttcaatttttcccagcatcagggtcctttcttagtgtttatttttggtacttaggaaatgtgcattcttaacttcagttatcattctgggcagaatatgattctatcagacataacatatagagacgtgtgtcaattcttgttattcactcaccacttcagggatccttgttatgtaccaggcactctgtggactgtaggggtggtccataaaaaatagtgaaattttgagtgcttacatacattttgtggagagcttgggtttcaggcaaggcagctaaacttaatgcagagggcactgaaggtggtggacatgaaatagatcagcagcagtgggaatggaaaggagagaactgctgtgaaaggtggaatgtaggcatctgattgtgtgagctgggggtacatgcagcgaagagtcccagacatgctgggatttatagcacaaatgttttacagctggacctattcaatccctgtatttaatacattgggatatagtgctccttcccagaaatgaccacctctaaccacaaactgggcttccctggtggctcagatggtaaagaatctgcctgctatacaggagacctgaatttgattcctgggttgggaagatcccctggagaaaggaatggtaacccactccagtactcttgcctggagaatcccatggacagaggagcctggcagattacagtacatggtgtctcaaagagtcaatgactaacactttttcagccacaaatcatgatgtatgtatatatcacatattatttatagtaatatatactcatatatcatatttatatagcatatataatgtatgatcataatatattatgtatagtaacatacagtgtacatattataattatataacaacactatatgtattatttatatcaaatgtttgcttttattatagttctgtgatcacccagtttaaatgtgaagttgaggtccattcattcttcctttctttcggcaaacctttattgaatgccctctctatcccagggtctggtccttatctccccaggctggccaagcccacatactgggtctgtccttaagacagactggagatcagttctgaactcaagagtcaaaaaataaactttggatttaaagaaatcaaacaaagagagtgatggaaaactgagaagagtgttccctgtgtctctgtctccttgctgcattcgccaaagacaagtgtgtggggacagaattcatctcaaccgcgcgcagcttgtacagcgccgacactcgcatctggttcaggaaatgtggaggagagtaagaatggctcattaacttccagaggacaagggatcaaaccaataaagagtggttcatatttttctgtacagtgacctcctctccaaagcagggccctcattaacctaacagctgtcctaatgtggctttaacccggtgactctttacattccttatggtttcattagttcccttgagacgcatcatgtcttgcaccacagctatgatctacagcctaacaaattccctacaacacccggcatatggatcttttacttaactcagcaggaaaaagaagggagtagttaatcactgattaaaatgccagaacaaaatcctttagtttttagaaggatctgggaaagcagtagcagcgtcagttcaggttgagtgatagccagagagtgtgttagtttaatttggggcacctgggaaaacccaacaccaaatcaaaaaaaaaaacaaaaaaaaaacaaatgtgtctacattcccctccctccatggaagaaaatttctaagctcttgtggataaagatgagattaaagctttaataacgtagacctttgtcagtatttgaaaaactttgtttgaacaataactatgttatgtttatcagggctgaatctgagtacacaatctaagaattactgtacagcaaaggcctaattcgcttaattcatctccctggtagctgttattatgaaaataatggcaaaaactacagttttgtaaggaatgacttgcaaacacttatgatgtgtaaaagttttagtaaatattccatccaagaactgtactaagcaggcaagtattcttgccacccaggtaatggaagacaggaaaggaagctgcttgtggaaaaaaggatttaactaggagtcagaagatgtgggttttggtctcagctttatccaaagggttttgtcgagcaagtcacttaattttgctctaatcctactgggcttcattttttaaaattttatttttaaaatatgggatttaggtcagatgaccttaggctgggtccatgaatgactaggataatcatgaatggacttcaggagacctgggaaacttgacatttgtacacagatgttctgcttttgcctctgtgtgtgtgcacacaagtgtgaggcagggagagggccgctagctttcctcatattcttacaagttaccaccccttgatcatttcattaattaaaagcccctaagatgcatgatctctcaggaccctttaacactgataatttgggattctcatggaagcccagtgatggtttaaaactatctaacagatctttatagttcagaagttaagataggtatgaaatatttggccttgaactccacaagggagcaaaaatgtggtcatcctaccattctctgccgcagtttgcttttgtgatgtataaagttctgcatgccctcatgtgtgatattcacggcagcatggcatttcttcttgtcagcctggaccgtcctctccccagcctgctctctacatggtggtcaaggctggatagcagctgtggtaggagggctgggcgagtggagtgagtaagaagttccagggaacaagcagattgtcaggacactgaatttacctacttggaaagtactgtaattgacactttagtatcacctctggtagttaatgaaacattttgtaatcttgttgtaaattctaagggttaacgattacactctcttcccatttttcaaactgtatttgaaataacccatctggaataatgtagattagattgcttttgaggaccacaccaaaaatgtgaaccagtaatttattgagagcaaaattaggcttacaccatgggacaattagcactaatccatgaaacttggaaacaatttggacctaagcctccgttcaagccagactggctttcaattatttgaggtgttatttgggcactttcctgcttgctcaggggcatgaaaggctttggctatagacagaactcagaaaacaaaggctttaattcttggatttctcaatgtgacatttttgcttaataactaacatttactgaacacactttttttttttaacagtattcttttacaagctttgtttgtattgtctcatttaattgtttatgttgtctcatttaatcctgtgaaggggtttttttcctcccatttagtagatgagaaaatagaggcccacagatgttaagcaaaatcttcaaggttacagaggtagtgagggacaggaaaagctgggattcaactcttgcctgcattgctcccatgtgaatgtaaagtatgactgtattttttaaaatactgagtttttatccagcttttattgctgagaacaaattggttgcttattttattcaggaagaggaaaatttataaaaacctattcttttgtgattatcttttcctcctagttattgtgatataatagtgatctttcagtcagtttcagttttgcttcaaaaaatcatcggatgttatgttactccagaatggacctgaaaatcatttccaaaagcatgaagagagacatacaagcatggaaagattcagggagcaggtgaaactgaaccaggctgtagttcatcaaatgaaataaaaacttgctgcaagagaaggttctgatgttgtgtgatattacacagacaattataaacaactgtgcctgatagtagttatccactggtatatgcctcctgccccacttccttactatgtgaaatgtgatgtggaaggccaggtaatgctggggagagtgaaatcacactgaattagagattttaaagtgacatttaacaggaaagtagcagactctgagatggaaaagactgaaggcaaaaggagaagggggcagcggagtatgagattgttagatagcatcaccaacttaatggacataaatttgagcaaaccctggcagacagtgaaggacagaggagcctggcaggctacagtccatggggtcgcaaagagtcaggcatgacttactgactgaacaacaaccaccacaagctgactttgtaaacttgttctttctgccctactggctaagaaattggtggaacactcatactctcctctagaacctcaaaggccagattgttgctattgttactcttttcaaaacaaagagaagtttctagtcattgtaaaaaccaaatcataaataccctctaccgattttgggacttcctggtggctcaggcggtaaagaatcttcctgcaatgccagagacctaggttcgatccctggattgggacgatcccctggagaagggaatggtaacccactccagtattcttgcctggagaatcccatggacagagcaccctggtgttctatagtccatgggattgcaaagagtcagacatgactgagcgactcacactttcactctccacccattttaagtgatttttttttcagtcttatgcacttacacgtgcaggctacagtccatggggtctcaaagagtcagacatgacttactgactgaataacaaccaccacaagctgactttgtaaacttgttctttctgccctactggctaagaaatgggtggaatactcatactctcctctagaacctcaaaggcgacagtccatggggtttgtctgttaggaactaggtgatagaatattggaagagttaggcagaacttctgagtgccagggaaatgtctttcagtcgcagatgggggtaataacagcaccccagaatcattgtgcttggcttgggtatttaaaatgaaggtgatttcaagggcacctttttcctattaaaaatagatgtgtgttttatgactttcaaagcctaaagaaggcaaggaccatttcccagtttgcaacttcagtgtatttttacttcagttctgcttctggcagtttcagctgcttcttggagatgcagaggctgccaggggcaagatgatagaaaactctagttaactgagttaaccagagacaggcagctcagtccacaagaagccctggtctctcagaaatagccctctggatttatttagccagaatttaaacaacatttaaattccttcctttgggaaactcttaaacctcctgttaaaggtttgtttttcagtaaagatttactttccaactattccttgtcttttacggtagttataatatatactgtatggtaaatataagaacttataaatccacctcctggtgggtttattccatgtcatcaatgtttacttgtatcattgtggaaaaatgaaacaaaaccaaactaccttgtacacctagccttttgggttttatcttttgaagggatttgtagaaagtcatgatgttccttctaatttattatctgaatgaagacattttttattttaaaaattgggttatggaggagttaccatgaacataaatcaaaagtaggttgggattgatggagtaaccaggcagagcccacccactggataaatcaaatttggtttacttatctaaaggttacagcaggaagttggcacagagagattggagacatgctctgataatgtcagaagggcaagcttctgagatcttcataatgaatctcaccagtaggttttgtgacagtaagtctgaatgagtgaagtcacatcataacttttggaaattcagctttcctccctgcctaggcagctgaagatgcatttcacatgggttggtcaagataagtgtgaggacccgtcacttgagccaggtgtgcctcattgatcttgaggttatatactatgaaatatgaccacggtgcgtgggatagtacagtacactcaggcatgaacacaaccctcattccttaccctcagcctcctcaggctaaccagcttgttccaaacacttccctgaaaacagtttttttgccctgatgcctctgggagtcatggtaacagacacttagactttcagtgagaagacacaattgatccagaaccgaaattgaatgccgttcctggttctattatcccaggtggcaatttattaagttaagtaaaactctaattcaattatgtatcaacttgagaaaatattgacttaccttcttttcctgtgggatacttaaggagtattaaatgttagtgttctgaggaagttcaaacagctttccttactagtatcttgcagcatgggtagagaagaccagactccttttcagacagatgcttgagtgaatagcaaaagtttaagcagatgccttggtaaaatgtttattaaactgggctttcttgtttaagaacggagggagggagacattcctctctccactcttttaaaattttgtgacttaaaatttagaattaagttgtttaagtgttaactttgttctgtggggaaatcaagtcatcttttcttaagcatgctggtctcttgtatcatctcttccatctggactgatggctttttgaaatcatatccaaacttaaaatgagttgacattctgtctctcatctaaagttttcccgattctctgcatttccaaaatggaacttctacctctagtgagcaattagtttggtgaccttgaccactctgtgaattccttgaagaaaagacagtaagctccttgagctcagggatcctatcttatctactccttttttcctctgataaaaagataggtgcttacagctgctatggaaagaaataataaaacaaactcattttgtaagggatcttcatagataaaatgcttttttttcttgaagtacctcttcaacattaatttctattaagatcagtataatgtctcacattttggaagagatggtaaaaaatagctccacttttccttctggtcaattttataagactctctaggagctgtgcacataatgtccatagaaatacagacacattgataagactatgaaatacaagggttagtgcagtaggcaaggccaaattaggacacatgtcttggagggggccatagagactcctggatcctccctgaagtgctgtagtacatgatggtgggagggtgccaatggtgatggcacctctgctcagccatccctccccatagtcaccccagagttcatgtgggggctcatgccagacctcagaaagcccttgaagtccctctactgacccctgagatctaactttcctttctcccctgacaatacaagccagaaggtagaggactcttgtgtctgtttgccctttcagtaagggacctttaatctgttttagcatgaaaaattcattaagaatgaactattatttcatcagtgaaattctcaaattttaaattaaatccataggtctggtttagcaaccgccgtgcaagatggaggaagcaggctggggccaatcaactgatggctttcaaccatctcattccggggggattccctcccaccgccatgccgaccttgccaacgtaccagctgtcagagacctcttaccagcccacagctattccacaaggtatggaggaaggcagtcaaggggttaaaatgtaattcccagtcttgttccctgctgcttgctttatacagtgaaatcttctgtgatgtccctgtggctgactgtatgtttgttacattatatcgggctgtcctgaaagtacctgtcacctttcagaaacatagtttgttctatgacatgtctgaatctctctagttaaactgtgttgtaatataatattgtttcaggattttaaaacaaaaccaaacaatgaaccaaaacaatctcccaaaataagcacgcaattggcttttcctttgttaaaacctctacctttgtactccagtctgcaattaactgaagttctgatggctcctcactggggtaggaattgagggtaggtaaactttgataaagtccttctatattacagcatgggctttccaggtggctcagtgctaaagaatctgcctgccacgtaggagacatgggttcgatccctgggttaggaagatcccctggagaaggaagtggcaacccactccagtattcttgcctgggaaatcccatggacagaggagcctggcaggctacagtccacagggttgcaaagagtcagacacagcttagcaacagcagaaaaatgttactgcatagaggtgaattggataaataagaagactaaattattttggattacaaaagatagcattgtgggcatttgaaactatattatcacactaatatttacgtgttttggaagtttatttgataagaaatttaagatgcgattcttacattggttaatctttatgttggttagtaagattcactactaatataggtttgttctcactgttaaggtgatttctgaatttctgttctggttaagtgttccttgaaagtatataagtaaactatgtacttgtacatatgtgcggaagagaggtggctctatttgttaggagtggttctatacttacatatcaagaagtacagtatgaaatttacattgatttgaccagtggatatactgatgggtgggtgactacaaacttttgcactgaaccttctctgccagccttcaaaggagatttatggctgataaccttcttccccccagccgtgtcggaccccagcagcaccgtccacagacctcagccgcttcctccgagcactgtacaccaaagcactcttccttccaacccggacagcagctctgcctactgcctccccagcaccaggcatggattttccagctatacagacagctttgtgcctccatccgggccctccaaccccatgaaccccgccattggcaatggcctttcacctcaggtcagtcccctgtttccagacagacgagttgctgtataccagaaccaaatagtcagttccctgaggcagtcatataatgaattgccaaatttaaaccataatgtattctttatacaagccacatgatttcagttttctggtttcctttctctccacccttcttatgggctgtatcaaaagttagaacttagacttaaaattcaagccacttttatcataatcagggagattttctgtttatacttagttgtcaaggtgtcatctgctccacatgtagtagttctgggttttgggtaagaagttcacacatattttttaaaatggtatttggtcagctgatagcgttgtgagtaagaacgcttaataagaaaacaccacagcttttctataattttcagagagaaggttaacaagttgtgtggagaatgacccatctgatggctgcagaactctgggacaaatgagttataaatgcagaatataggagaattactgctccttgggaatatacagaaatttgaatgttgtaattgtttttctaatttgcattggactatgagcttttcttgagagattatattaataaattgccttgataattgcatgtcagagggttggttaaatttcctacatgtggcatctgtctggggttgacattattagcagttgtttaaatacagatcacttgattttattagagagcacttggcccaggtggcgaggagagctgcccgctaaatttggagaaatgtcacgaaggggttgcaatctataattgcaatcaagaatctcttcagggctgagagtgagagttttaacagctttatcttttcttaaccccctttttcctcttggtggttagaaaaacagagagaagctcagaatgacacaaatgaaaagtgaaaagacaattatactcaattacacactaatcactgactatcaccactgcctaagcaccaagagggcattctaataggcagaaaatgagattttaatggcacaaagggtggccaaaataaggactcatatatctttgccttcttcgttttcttcaacttgtggtttgcgtcttgggagtggagttcctgggctctgcataacggtgataactctgagcagctgaaaagttcaaagctgttgcagttgaaaagaatgaatagcaaaggcaatgaaataaacatttctgcctaaaggcaaaagttcataaatccttttttgtaacagtaaatgtaattaagtttcatagattcctatagcacatcctgggataaaaactaagaggtggctgtaaaccttggctgcaaaatagcaacatgaaaacaatggacgtgcttcctacaggactttaatagacttaatttccaagtactggcctttgtgaatgtggttttgcatgaaaatcatggacttatattaatagattcatgtttaaagggctgtatttagagcatagaagcttctcccacagtttacaaataacatcagaagtagttgtctctgcagtttaaagcgttaagcagcttgcggccacagaaaagatttttatgaacacaattcggttgagagtttgcataaaagtaaacttcaactctgtaaggtgagacccaggattctcttggcatatgtcagtggtcgaatattataacacaggtattatactgtgttatttaagtggaagtactagcacttgactttgaaactgttagtccttgatttcaagaagactggctatgattctagagttggcagtagggcaggaatgattccattatcaagcaatggaaaattcctcgggcaacttctgtgtttctttacaatgctcttatacattatgttaactccttacttattatattgtggatatccagaatattttgcatttctaccatatatttcctcttcaaaccaccagttgtgttagttgctgtagcatctctagtgagttagaagagagatgaataatgtgaagttcctccttatttccttaggcaaaattggagaaaaatagctgagtgaatcaacatcttgccggacgtatatacaaaatagatggaataggagcattaggcgaattgggtattaggacttacttttctatagtctttgagactgaccgcttctcaggaatgcctctatttaagcaaagagggatatgttcactgtttttggttgtttgtctttattaaagatatcgtagggatttccctgggagtccagtggttaagactctgccttctagcgctagggggtgtgagtttgatccctggctgggaaactagatttgccatgacacagggtgtggccagaggtccaaaagggaggggatattgtatccatagagccaattcacttccttttacagcagaaactaacacattgtaatacaattatactccaataaaaaagtttaagaaaatattgtaaagaaaattgaagaaaacagtccacatttaacagccagtttacctgtttatctaaagaaaagggtaaagaatggtgatggctgagtctttttgcttgttatagggaagtgcttattgatatattggatcatataatattaaatatggagaacttccctggtggtgcaatggttaagactttgccttccaatgcaggaggtgccagtttaatccgtggttgctaagatcctacatgcctcagggccaaaaaatcaaaacagaagcaatattgtaacaaattcactaaaaatagtccacattaaaaaaaaaaacaaaaaaagatcttaaaggaactaatcctacaactgccatttctcctcttctttccaactcttgcactttctatctctggctgaaagtctgatacgcagacaaatcagctgaggctcagagaacttgtggccatatcgctagtgagagagctgggactagacagaattcctggctccttgtgtagaacctcattacttacagcacctagttgggtggagagaagacagattaaaaaaaaaaaaaggtggggactttattcatattttaaaataattttatagaagctagttttctaaacttttggatttgggttaattaatactcttttctaatgcactctttacatgcttttttgctttatgcatttttcttatcaatcttttaacttcccctagtaataaaaagtactttttggttattataggaaatggggaaaaaatttttttttaggatttcctttctctggagtaggaaaaaaattcccctaggcaaccactgctaatatttttgcattttaccttccagctctttttgggtgttatgctttaaaaatacatacataattgagatagtatatatatatatatatatatatatatatatatatactatatcataaaatatgtaagcttccgtctcgccttttccctgcctttgtacttcatcataggtcttttcttatctactaatttaaatgaaattggatctaaagttttttgagtcattatgatcagttcattgtagatctctttagtagatgccattttatttgtgcatcttatttgatttttttcctactggcattgatgttgatgtatcatttgcccttcagacttggaaatcacgtgttagaatgtgtgtgaaccattgtaaaatcagctttctagttaatggaattaatagacatcattatgataagcaaattattccttacggtttgtgtgtgggatttagttgattttcctctggggcctctaacatatctatctgctccctcaaacaaagattcttttaaggcttggcatcagagccatgagtcaaagggtgtttctcagatgcccttactgctttcctcagagaaattctcagctttcggagggatgggtgtgaagcagtgactgaggaaaaggtcactgtccagttggtcagatgagagtagcaacagattgacaaacatgtgtgacattctgaatcttagaatcctgatgaaaacttttagagacattgatcatatcccatctcaagttgcttaaagtgtctgtgcattactgaattcttggcaagtgtattttgttctgagggactccataactgtatccattttatttttggaaaagctgaggccgttgcaacacagtcagagtcactggcagaggtaaaagccaagtctgtcgctcttccaggcttttttggctgtgctgggtcttcattacggcacacaggctttcctagttgcggtgtgtgggcctcgctagtttcagtgcatgggattctccagttgtggcctgcaggcttctcgggttatggcttgcagtgttagttgccctctggtgcaggatcttagttccctgaacagtgatccaacccacgtttcctgcattggatggcagattctttaccactggacagccagagaagtctcttttccagtttcactagttctttaataaaccaaattacacatttaatttgccaaagaggcatgatgtcgtagaaagatttccatgggctccagcactgatattcaccttggttttccagcggggagaatggaaaggcttcacagatgaacgactgggcttcacgctccctccaaagctggatttgttaagatatcttgagattctcagtgttgggtggaaggagaataggataatttccttgaaattttctgctgtctctgaatttctacataaccattctagaagttgaggcttttataacaaatgacaaaacaccccttgagaagaaaaccgttcaactcactataccctgcagtagcgccctcttttgaaaagttgtgtgtttttggtgtggggacatcacagaaagaaaacagggaaatagagaccatgtattttccctccaaacccagctggtatgttcccagcaccttcctgcatgtgcagtggagaaaaaggaatgccgacctggaatatggagccaaggaaatacaaccagatgcttgagacgtgagactaattaacatttggcccatgttcttctaattaactttcctttgcaagaaatactaccctgacggctcccccacctccaaaacacacatagctaaacctctaaaacaaggacaataaaatgaacaaacatatcatttcaacacccccgacccaaatcctacaaaattccacagtttttggtgacagcttctaatgatttcttgagtgaaatacagtatcagtgggttacaggtttctaggaagctttttttgttgttgttatgtagtatgcaaaaatgggccaacttggctgcatttagagttcatcaaccattgcaaatgattcttcaaatgttttgggtttggtaaaacctaaaacacattttgccaagcacttttcctccttaatttttcaaactgtgtattttagggaaaatttgatccatatggttttgattcatttagtcttatatcattgacatttttttttttttcctgtggagccatttgatatccaagaagctttctgagcctttgctgtgttcattttaagcattttcttccttaaaaagaggaagtcctctttgcaacctcagaggctataaattttgagtactctctcagttcagcaatacttaaaaatacatttggtataaatctggattattatgaacacattttatgtttagaacagatggagtgatttttgtttctggttttatgagtgaaaccaatgataaaataagaaaataggcttaaattacaaaaaaagttttgttttagacaacatttaactgttattaataaatccccacggtaagatctatgctcacagacctcactgcaaattttgtccaggtcttgggtaagatgtaattgaataaccagtacacctgtcctatttcatgggtaatctactgaggaaagaaaaaaaattctcataaagatttgtgtaccaggcttcaacatgcttgaatgtttgctcaccactcagcatctcaggaacaaagagtaggtctgcagatctcatcaagtttatggaccatacctctgttaagtctggttgaatcatcacagctttgtggggatgagatgctgtctctgaaacagacccaagaaagagcagatagatctttatactaacgagattgcggttaatggcggaagacacgaggatcaacttttgttcttattcatattttacaaaaggaaccctttaacttcaccacccatccagttgcttttaaagaataatattaaaattgagattattagtgtgtaatgtatgtaaattgcatatttggtgtcagctacgcctgttaggcagcttctccatttcatgcatatatgtattagactgtcgtggttccatttcaaatcagatttcaattgctcagcacagtctcttttgacaaacatttgttaatcctgaaacttattagggagatgcatttaagtgttaatatgtatacaccaaactcaagactgcttttgattttgcttgtcatttcttggatcacagtgttcctaattatctcaaattccttagctgcaaggcaagatgaaggatctgtgtccatcgaaggtgtaagggtttactacagatcagtttgttatgtgaatggggtaccgtccttaagaatgcttgtgatggatactcttctgtttcctatagaaagaatgtccctttcattgtggcatggcaattccttgaccttcttttgtactgttgatgcatgtgaaagcagtaagacttcccctcgtggcagctcctgtttcaggagagctatttttctggacattttgggcacacatccagaagctacttgatgccaggccatttgttctgtccatttcacacacaagtttgcagatcctctgccctcaacttacctttatcatcgtgaaggagcaggcaagcaggtggcctgccaccaactcatttcccaacagaggcacctcttttcttcttccttttttttttttttttttttttacaatttccagagattcatctgtggacagaaaacagtgcttttcattaaagagattggttggctgtcaaacaaagcctggagagagaaagtggcagcctctctgaagcttcagcctctttctgtttcatttctaaagcaattcatgaggtgcagaagccttacatgtttatgaaggctcaaggatgtttatgatcatcagtaagcccatttcagctattccagagtagccgctgaccatttgcaggtttccattttgccacattaggttttcaagatgtcctgcttggtggtgaaaacattgctgctaatccatttgttgaatcaaggcaggctgtaattgacatggtgcctttggtttttctccgaaggctgtggttgctacccttaaagagtatgaggagagcgctggtttatatcagttctagccacagcctcttgtgttagttatccagagttgaagaattgtgagagaaactagtccttggccaaaatctccctttttaagggaagaaaggagcagcagcctccagtgactaaatcttaactcatgtcactgaaatgagccacgagaaaacctttcttgctgaattaaatttgtatgtgtgtgtgaattatattgatttaaatagaaattctatcagctactttctcttgtacattgaacaaatcaaatgtaacaaccccatggtttttaggtccatttgaattccgttagccatcagggagaaaaaattgagtgtgattgcttggtttataattaagctactagagtaaaaagtttttctttgtaatcagtaaaacataggaaagccatgctggattctagtgtgaggccaacggcctgaatcaaccctttatatgtggttggaatgcaacgtaaagcttttaatttattactgcgtttgcaaaacggcaatatctacagaaatctgaatacttgcatatttattcaattagaggctgaatgtgtgctttgtactgcagacgcagaagactggattcagtcattagttgtgtactattttttgttgttttttcttttttttttaaaagaatctgtctctgcaaaacagtctgggttctatcagaggcgtatatttttcaatatgtagtataatattttaaaattactcttgacatttagctagagttcagtgaactagagtttctgggattagtgattgcgttgtctccactgatcaatggaaaagatgataaagaccctttgaaacagtgcattttgtagaatcaaagggttgttcctactttgtagggagtatttcttagctgtgagaggactgcaggtattatttaaagaaataaccgtctttttcccccccatgaaatactgacgtcttattttgccctgcttgcattaaaaagtctaattagatatttacagattaaagaaacactctgtatcacttctctgccttttggctaagatgaaatgtaaaaatcctcaaaagaaatgaccctctatatgtacaattccacggaaaaatttctagttcagtgtcatcccttttgtgatgcttctaggcagaattcctttagtctctattgatgctacactagtgtgtttataccttgttaaaacacataccacactgtattacaatatatccatcccccccttggatcatgagcttctagaggcatgatactaggttgtaatcatctttgaatgcctagaaaccaaacagtgtctcgtaataaaggcttgttcccaaagtgggctctgtggaatggtggtttgaggaaaaaagattttgaatcaaaaatctggtaaatatttcaaattatatccctttatctttcagagtcccagtgcatattagcctactaaaggctctgacaaatcttgcagtataaaaacatgtttaacttggcattctctaatttgactatggatcccttttgttgagtatcagactactaaattttgaggaacattttctaggaagtgctgaatgaaagcagtggagagtagagacccaactcatgatttgtccatttctagaattgttttttatatttttcactagtgaatgtttcttctgttaatgtctgatattatcttctgcttgaatacattgtcatcctctgtaggtgaccttaggggaaaaaggggtaattttagaaaagaagctataaactgcttaataatatcgataggtatgaaaatgagtaaaaacagagaattcctgtttagtgaattgatggccatgtgggtgtaactcattgatctaagcaggaacgccaaagtcaaaagcactatattgcaatacttgacagccagttacaagctgtgtgtcttggggcaagctgcttaaactgcctcatcttctgttccattctcttgttaaacttggaaggtattaaaaaagaatcaccctatagagctatgctgagaaacatagtacttaaaagaactaaatgcattttggtaaagagataatactgtctgttgcaatagagctttcattattgtttacttaaaaaaaaaatcatgtgggcctctgaccaaaaaacatgcttttgtttgtctctgaggaagaaggcaaatgtggaagctgaataccatcaaaggaaaagcagtttcttggtgactggggtattttcagttattctccttagacattttaaaggcccaaggactcatagtggcgtccattcagattgcagtcattgtaatgagtatacctgggatatgatactgcccccacatgcattgtacaaaaattagttttgtttgagtaattcagatcacctgtggcttcccaggtggtttagtggtaaagaatccgcctgccaacgcaggagacacaggggatgtggattcgatccccgggttgggaagaccccccggaggaggaaatggcagcccactccagtattcttgtcaggaattccatggacagaggagcctggcaggctatagtccatggggtctcaaagagttggacatgactcagtgacagcatgcactataatgaaaacaagaggcaaccatccttcgttgcatggggctaagagtagggatgggacacggttgtcttattgtttcctattcttattcttgttttgatttattgaaatgtaatactgacattcccaggtggcactagtggtaaagaacctgcctgcaaatgcaggagacccaagagatgtaggttcagtccctggaggggggagaacccctggagaaggaaatggcaatccactccagtattcttgccttgagactcccatgaacagaggaccctggtgggctacagtccatagggttgcaaagaattggacacgactgaagtgacttagtaagcaagcagtagtgacatgaactcatttttaaaaaatcagtggttctgcttctgtgatactagataacctcaaaggcaggagagtctgatgaactatacttctctctcaccaacaaaggagaaagttagctaaaacaacaggtacaatggaaaggttttagaaagtaaaggacaatcttaagtaattctgagttaactgactggggagtattctttatcactaaattacaaagattctcttttgtcaggatctgtaggagcagagttcatttctgtagataaaagaactgtctacgtacatgggctctgaatcttgccagctacttcaggttgcctgggcaataggagacatagcccctgcctattataatcaaggacacaaataagtttagaggtgagaaagcatcaccatgtctttattggtccagtttctctggcattgtgaaggtggggggattaaagtaggtaggattttaacttagcttctaattcttagaagactgcattctcagatgttgtcccatgtgtatacagttgttacaagtttccaagcattttaaatgaaagtttattctgccttaacacaaaaacctgtgaaacaggccagaaaactcttcttgaagggtaagttcattctcagacttttgtgaggctgtgatctgttaaccatttcccatggttaatagaaatagtttccctgatagctacttgttaaatcagtatcacttgatcttttcacttggctcttttctctgtcctgaggccaaatcggaaggtccgtttctgtagtctttaggcatttagtagatggagtcttatgacacgggctttgggcaaccacaaaaatatttgcctacatcacacacggtctggaagaaagaagaaatttcgttgttgagctgggcaactttttcctcccttagtaggaaatggaatgtctgccttccaagtttgtggggggattggagatgtagtataaccgagcatccttctgcttcagagggggcagtgttgaggcccttctttctaaaaggtaatgtggatgctaggttattgtaaggttgtacgagaatctcaaacagaactgggcagttaggattcagtaaggtgtgcgttttatgaatggttattagggtgaatcagccctgcatgtccttgaatgcaggcatagtttataggcaattagaattttaaacgccatttcattgaaggactgtggaatgcccaggtgtagagctttttcctgtctatatttggtttcttaggtctcaaaaggtcaattaatatttagcaaacgtgtccagaagtagtcatgaaattaaaccaagatatatgcttgattttccacagtcatgttttttagacaggtttttgaaacagtgataggtttgagtacttactcttcagagggctactgcggtggtgagagatttcctgaaaggagaagagttaacagcaggtaatgtcattcctcccagaaagagttggagactctctgtgctaagtgatgaatgagggtatctgacccacatgtgttttacattagaatggaacattgccctgacatcgttaggagcatttgtcaagattccctggacagagcttctgtaaattacatgctgcaaatgtgtcagggtcagataagaggatatcattaactccctcaagtttactcagggctctgtcagtccatcttaatatgctaacagcccacaattttccttgagccgttttgctgtatttttcattcatagaagaaaaaatatgtatgctatcccctccccccctcaatatcacacatgttcttttctaataaatcatattaattgtagacatggtcacaaagcatattaaatgcaggcatgcgtaaatgaattaaaacatatgagaattttattacagcccatggtgggtctaacatagtcaaatagcaattgtattaaccataagtgttcatttaggtgaaatgaactttttcttaatgggctttattttattgataatagatggacatgatatgattgtccatcattgtctagaaatacactctatatgtatgtgtatatgtatatatgtctcttgcaagccgtttctatgttaattttctgcctgctgctgctgccaagtcgcttcagtcgtgtccgactctgtgcgaccccacagacggcagcccaccaggctcctccgtccctgggattctccaggcaagaacactggagtgggttactatttccttctccaatgcatgaaagtgaaaagtgaaagtgaagtggctcagtcgtgtgtgaccctcagcaaccccatggactgcagcccaccaggctcctccgtccatgggattttccaggcaagagtactggagtggggtgccattgccttctctgaattttctgcctagatttatattttagtcatcagtgtctaaagaagtctctgttgctatccatttgacagtttaggtctattgagaaagagatattctaaagaactaataaagtaaaaatcattctgtaactgatcacagacttggagattaaagcacatgtaacacttaaaagtttagcttatacagtacttacagtgctttttttcaaataaaccttggaaatgtatgtaccatatgaaccacacttgtctggcattcttaccttttcatcatgcatgaaacagagctacttaaaaatgttagctaaggattaacattaaagaaaaatttgagttggccaaaaatttcattcgagtttttctgtttgggtctttaaatgtacagaacaacctgaacaaactttttggccaacacaataagtatgtatttggctggatattttacatgtactagttttctttctggttaggcagaggtcagccatgcccttccctaactctgggtgggtgagaaggtcatcatccttaccttaagagaaacttctgccttaaggcaacttccttcttacagctttcaaacagagagggcaaaaaaaatctaattatttagatgctaatcaactgcaggataattcctaaggcatttgaatctgaagacaacattttcagaaaagtctccactgtccaagtttaggtttaggtaatgccttaaaaatatagttgctgaaatttaactatcaggtaacttcagtagcaccagtattgaaaaatacacttgcataaacatttggaatttttgtttggttctggaaataaattatatccagattttagaagtttaaaatcattagatttttaagaaaagtgtagaagctattaaaataaaacctctgtatcatacaaagctgtaactcacagtggttttccaaaatgcaactaaatgtgtattagtaaatgttaagttagaagaacatctgattacttaagagcaaaaaagaaaataaagacatgaaccaggattcctgctaaggaaaaaagaagtgcctagacgtacaccataatatgctaaatcattttagatttctgataagctctaagcaccttcaactgatggcaaaatcataacacgtaagccaagacaaatattttccagacacattgttttaaatgtaaatcttaatttggctcacagttttttaaaaaaatcttttatatttaatcttacaataggaaaattaattcaagaaatacggcatgaagcaattgtaaagttagtttttcctgaaccatataatcttccaatcaagatataaacaacctatttggaattctgaaacttgagaatgagtttaaaaggatcttcaaaaaagcttctaataatgggaatgactaaggaaccggcagaagtcccggttgatgattctaaggtttgaatttatttttaaaggttgtccataaaacaatttagaaatgacatctgggaaatatttaccaataaatttaatagatttttttttatatgcttcaccttagagttgtactcaactacaagttaaaaaaaaatcctcctcctatctcccttcccaaggagacagacagatatctgtagaaaaggaataattttcttgctcattgctgttcctggacttatctgacatttaataagaatatgactggtgttcagttgacagaactgagtagccctgagtatttttttttcctttgaaattatttgtgaaaaccaggcgattgtgtttcttctatctcaaattaaaaaataaaatcaggcaaaaatggcctgtagtagaaataccttactgatagcttatgaggaaaaaaccccactttgcaaccagtgaagattttattttaggctttgaattacagtttgctgtaggaaaagcatttatgaaaaagatcctgacaatattctttaaaatatgactggaagacattctgtgaccatattgggggagttctaagaagttcgtttcccaactttgtgcagcaaaaagaaatttccatagcttcccttgaaccacatggaatagtaaaattgctttcaaagaaacgtacataaaagtgtaataggacccttccatagagaattgaggttttaaattatgttaggggaaagtaatacattttgtattgatatagttatttttctttcctaacacagatttcctttttgatttttaaataagaagttagtaaaatgatgtatatacatctcacgttttctcagcaagaaacattgaaattaattgtgttagttatcatcattcattagcttccatttcagagcacatgtagggttgtattagtgcttctttctccatctttatacaattcctgagaaagaagtcatggttacaatgtgttactgtctcaatggaaagaaaaactcatgggagacggtctgtctcttgggcttgctcagggaagtcaaagggataatgggtctctggtcttctttatttcctcacattagcctctggaaatattgggctgctgagctaagggcagctgctgatataggagctgtcactagcttcgggtgtgtgacattggtaatagtgacaggaagacctaacaagcgtcctccttgttccattcacacagcagccactcctcctgattggatcaggacccaggatgtcttcaggatactgtgccctggcacctttaaggaactctctttctcttgccctagaatatggccttggagataataccgtatcttctccatccatcagtagataatgtttcaaggtcttcctgtcctaaggtattttctaattcagcaactccaattagttgctacaaaaacagcataagttgaattttgcttcttggaaggactcatttcttctcttttagggtcttcatgtatttccccccatggacaaagttattactgccttcaaaattttataaacaaaaaatatatggcagaggatttaaaaagtttatcataaaactgtacatatagctcatgggagagtgggcatgtcttgaataaaattttgctcttactcttcaactgtaatggtacatagagtgtaccatttcttccttaaagtgatataccattaacagaatttcaagtagtatcttcatgaagaacactattaaaaatatacttcttttttatccagtaacactgtatatttttcttctctgatttgatatagttacaaagttgcttttcctaagtgctttttgcaaaaaacttagcacagattatttacacagtaaaatatttgtgccctgtgttaaaatcccctttcattaaaaatatcatacttaaaattttattttttattggggtgtagttgattaacaatgttgtgttagtttcagatgtatagcaaaattattcaggtatacctatagctatatttattcttttaaaaattcttttcctatttaggttattacagtgtattgatctttatagcaggtcggtgttgattatatattttaaatatagcagtgtatatatatcaatcccaaactttcagtctatccctccctgcccacacttcccttctagtagctgtaagatcattctctaagtctgtaagtctatttttattttgtaaataagttcactgtatcattttttaagattcttcatatcatttgatacttgtctttctctgacttacttcacttagtatgataatctccaggtctatccatgttgctgcaaatgacattatttcattctttttaacagctgagtaatattcctttgtatatatgtaccacattttctttagctgttcatctgtccatgcacatttaggttgctttcatatcttggctattgtaaacagtgctgcaatgaacactggtgtacatgtatcttcttaaactatggttttctctggatatatgtccaggagtgggactgctgttttttttaaggaatctccatattgttttccatagtggctgtaccagtttacatccccatcaacagtgtaggagggttccccaaaatggtacatttttaatatttttattttccttatccactcttgtctattaggctggcattcaaggaggtgctcctgatttgaaaggattgtgtttggtactgagcaacttctattttaaagactttttcttctaatagacattagtaatttgggctgaaagaaaatatttaataaattagtatatcaactgacctttacaaaatttcccaacaaataccataaaatcacctatgtgagctcaaagaaaggcaaaaaaaaaaaaaaagaaaaagaaaaaacaaccaactagtatagggggaagaacattcaggaaataaatgtcttttgcattatgtttaggtttttttaaatgagaaaatgaagtaatcaacttactgtagatagcattatatgagagcccaagttctggtgactttcatcctcctagagctgggaatcctattgattcttactttactttgtgactctcattttccttaatccccaagaaaacagaactacactctgaaacatataattattttttttgaatataattttagagactttgaaaatttcaagcttaagaaaatttagatcccttggaatgtcttttaaaatttgggaacaactgtgttgcttgccctacactggccccccttcccatcggctcacacatcttacacaagaactcaagtgaagggagccaggaaagggagcacagagacttgggggtgtggggaagggggaggtgagaaggtggtgaacagattctcttttgttttcttaccccatcccccctttttttggtcttttggggctaattgaagatggatcagtttaaagctttgtttcaggaagattttgtttagctatgaggattatgcaaacccttcccaagggggattgtggcctcactggttttggaatctaatttaggcagctttctggaatgcaagattcacccctccctcctgcacctccattcaggattctgtggcctgaattaccttagtgggtaacagaggcctctagtcaaggttgagttccattactgccctttcgtcttgcttttatttgtgcattttcatctccatatgcttcagacttcctaaaatacagagggactaggatgggagtattgtgccgtggtgggcccccgcattgaaatactttgtgagcaggtaaagctctttacccagcagtctatttcttctgcgattgctttttgagccctgccaccaacttgtacgaagttgagaaaaaaatcacttccattcttgggtggcagttttccagctgcaaaattaattgtccacttgcttccatcacagtgtgttgtaagggtcagcgagcctgagtttgtgaaactcgtcaccgtgctaatcagaaagttgttctgttattacagttttgtttttttttaaagtttgcttgctctccagggttatttaaaaagccaaacagacttcttataatatgtttgcatttcaggcttttttttttttttgacacttcttatgaaaatgttagtttggagaagaaatgaaaggattaggtaaatggaggaagttatttgaagactcatctgcctgataagtgctaagaactgttaggggctgagaatataagaatcagtagttcactcctctcagaacactcacaattcaaagtaggtgaccaagtgttaattgcacagtaagaaggatggggaaaacacaagggaatgtcagagaaggagtattttatttctaactactgaaggatggccaacgtaaggagagtaattttcttgagagggaacgctatgaaaaaagacaaagatctcaacatacacaaaaagaatttgatttagattcatgtcacttaaaaacagtataagcaaatgcctgtttaaaatgacacatgacactcccagttataacatggttaaacattattcaaaaggaacagttacaatttctccctccttccatccttctgtccctgtgtccttccttccttgaatttccagcctgatcttatcactaggggcatggtgtccgctctcttccaccctctctccttctttctgaaactgcagcccgatgttatcactgggcatgatgtaatagctctgccactttgaattgaggttaccctcttcgggacggccctctcacagcagatttccaaagaaatcaaacttggccttttccagttatcccttcagctacaggctagggtctggtcctccctgcattctcacttcttccccatctgcctgtttattttaggtaatgggacttctgaccaaccacggcggggtaccccatcaaccccagactgactacgcgctctcgcctctcactgggggcctggaacctaccaccacggtgtcggccagctgcagtcagagactagatcatatgaagagcttggacagtctgccgacttctcagtcttattgtccacccacctatagcaccacgggctacagtatggaccctgtcacgggctatcaatatgggcagtatggacaaagtaagccttggactttctagggagtgattattcctggaagagtgaaacactttaactctttctggagaaaggggagctgccaacatgattaagccttccatcccggtatcaattttgtggcaaagccagctggttgttccagcaagggcttccttgtataattattttcttaactgatgtcaacaacctcttgcgattattaattgctgagacgtgaaagctgattgccactaggtaaaacacaagtgttggcccaaacgaaataacccctggcattagaaacacatgttcttaatgaggtcagctcaaggatcatatggggtataatccccaggacacagagttctgtcaaacttgtctcaggaataaaaatattagtctcgatcctttgataccccggtattaaatatgacattgtcagcctgtagctgattttgccccttgctgtgaattgtcccagcctgacctgaaaagctgcgtgtgtttccttacaggtgcctttcattatctcaagccagatatcgcataagtgaactgtccgcttggagcgtaaactggccctgtttccggtctccacagcctagacatgaagaatcttctcagaaaaaaaattaccctcttgggggggcagtctctacaggagacaaaggagaatgattgattttctttctccagtagttggtttcaaattcttttgaacgtgtcgaacaaaagcagtggagaaaaggaagatccggaacaataaaagacaaatgcaacattttaaggcaatgatttaacatggctacatatcaaatatcccaactctagtgcagatgaccaaggagctaaaacattccatttgtgtgtgtgtgtgtgtgtgtgtgtgtgtgtgatttattttaactggtttgggtaagcagaacattctgaaaatatagtcggagaagaaagtagaacaagtttgacgtccgatgttgacacttcgacaactttaaaactgctcgctccatgaagccagaacggaggcgtctttgacacactggaaat

SEQ ID NO: 217 - DNA, 16649 bp, Hippotragus leucophaeus
  source 1..16649: mol_type = genomic DNA
gggcagggaggggcaggatttgaactcacagctgcctgactcaagagcagcaccacaccagtgcccccgtgtctgttcatcacgtcatcacttgcatcgctctgcacctctgtgcaccaggcatcctggaggaaggtgagaaagcctcagcccacaggtctacaccccgcagggacgatgtcctgctggcaaggtgaccaaggcaggacccagggaaggctccaggccttggccaacaggcaaggtgctctgtggggaggacttggcctgctgggttcaggtcacacgggggacggcgagggggtggagagtagatagagctgcagcttaggtcgagtgcaggggcagggagacagggggtggtggagctctgtgggattgaggactgccctaaggggtgcccaggctcctcatgggggcacctgcaccttcttcttgactcttaagagaaaggaagggagagagaaaaggcccagagtcagaggaaaggactcaggagaatgaatgaacgaatcaatctccatcttatccgcaaggagaagggtgaggaggaagaggagttggggtaagtattttaaaagttccatctcttcattgtagcagttagagctcttcacaccctcaaaggccctgcctctctacaaagaaaaaagtggaaagcagtgtttcccaaactcagttgcccacaaaacttgtcttttcaagagaagctgatcaatgcctgaggaacacggagcgccctgaagcaccaccttggaaacgctgggtcaggcattggcctctggttttgaaatagaattcatgggctactgaatctggaaatggccttggagataagctagctgcccccacattctataggtggggaaactgaggcctagagagggtagaaagtggctgaggcaaccctgtgccccacagccctgcggggatttgactgccccacccctgcttggccgtggaggacctcggccatgccagggttccgggtttctctgcaggtctctcatcaaactctgggctcctcaaagccaggtctggcgtccaccaccacctccctaccccagctcctggcctagcgccctgcacagagggtacgttcacaaaagttcaccacagcatgagaggttcagggagacaccaggaagggctttctggcagctgggcttagatgacaggaacgagcagctctgagggcttctaagaaaagggcagaggccaactgccccgaggcagccctgggcactggccccagcttccttgttcccggagtgggcgggcttgggagggcaaggaggacacaagccccaggagctgccttcctggcccaggtccgtgaccctcagcttggaccaaaaacaagggccagcgagaacccttgtcaagacaggcttggaatgccgtcctcccctccgccacccccacccatgctcaggcttccacctccaggaagccgctctggtccaccccagccttccccatctttttctctcaactcgggtgacacgtccactcagggaagattccctgaagttatgctggggcctggaggagctgagaccaagaggaaggcatgtccctgccctcaggggggccctcccaggaggaggtggagatcggtctggatgccaggctgtgcagtgagggggtgaggcagctacggagccatcaccctctcctccacggggaaaggaatacaggaaaagaattccaagcgaggcgtgtcccaaagagagggcctctgagatgggctgccagcagtgacgagggggagggaaagcacagagccagtgcaaaggcctcggggaggggtggggggtgtaggtggcaggaagctatgcctggggtctggcgtggcagagcagagtggtcagaggctgggctagggggaaactatgggtaccaggccgggcccttccatcattagctgcgtgagctcgggctcatcactgaacgtctttgagcctcagtttccttcccagaaggagaataaggacggcacatgagtagggagagctgttgaggctcccaggacaggggtgtccacggtggggccggcccagggggctctggaagtgtggtcttcactgtcgaggggccaccggcaggggaggcccacccatgaagcacttgtcacaccgctctggtctgactctgggattcaacaggcagattacaaactcctgactctaatctgcggtcgctgctctgtaaacatctgtgcacctgaactgaagtcaacagcacccccacctccctgtctctaaacttattttttctagttatcatttactgagcacttactctgcaccttggacagcaaggagatcaaatcagccaatcctaaaggaaatcaaccctgaatattcattggaaggacggatgctgaagctgaagctccaatactttggtcacctgatgtgaagagctgactcattggaaaagaccctgatggtgggaaagattgaaagcaggagaaggggatgacagaggatgagatacttggatggcatcaccgacttgatggacatgagtttgagcaagctctaggagatggtgatggacagggaagccaggcgttcatgggtcgcaaagagtcggacacaactcagcgactcaacaacaactctgcaccaaacattcagagtgtgtgtattctttttgtttgttttttattttggccgcgcagcgtgacttgtggaatcttagttcctcaaacagggattgaacccaagacttcgacagtgaaatagccacgttctaaccactggcctgccagggaattccttgcatactcttttttttttttaacactttttctattcatttaattttgtatcttaaaagatgatgaatattcataaagctcaactgtaataatcatttcctgatgtatgtaagtcaaatcattatgctatacaccttaaacttatacagtgctgtatgtcaattagatttcagtaaaactggaagaaaaaaaattttttaatgaacatttaacctagtcaaaaagttctgtgcctgtgtattcttatttaattctcccatccacttgggatatagtgatatataaaatgctcaacatcttatacaagcagaaaccaagtgtgagaggttaacagcataatctgcccaaggccatatgacacgagtggcagggtttcctgactccaagaccagtgctctttccactgtacccgaaccctggaagaacatgtctgaccagaggtaagggacctcccaccgcccgcctccctccccaccaaacactctcccagactaagcttctgtctgtgagtattgtacccttgaccctgacctgtgcccctcagcctttccccttcccaagcacagcccctcccccaccacaccccacagctccccaaacaccccagggtcactgcggctctggcctccagctcaggggtccagagcccagccccctcccttctctggggagattttgggttctgcagggggtcaccacagcctcagggttccaaaaaccccagtcagggagagcaaggcctcccagggcgctgcaaaaagcaaacacttctgaatcccatgcccagaaattcagaattagccagtctgtaggggacccaggcttcagtgtttctttaaggcgccacagtgaccctaaaagttcagcaaaatttagaagcaatgctcgaggtgattgctgggagctggtcagaaagtgggagcagggcacaggcctgaggaaggagtgagaggacaagctgaaccatgcgggtctcatcctcatggtgcctggagctgaacagcagatttccccatcacatctcacctggggatctgggaggcaggtggggggatgtaaccaatgccccaggggacagatgagggactgggaccttccacaaagctggaccagtgcccccagaagaggactcgggagctaaagggttaagggtcacggccaacccaaagcagctccaccaggcagagtcatcagtgggctttacatctgatggacagaatttcatttgctctcttcctctcaggggcccatctcaggaataaatctgggaccagctccacagaacccaggttggatcccagaaaaaccctgccggtcctgaaaggcctccgcccagagaagccagcctgaaccttaccattataccctcccttctggggaaagagaaaaggctccagagttccccagcaccacacctctcccaggatgggtatacgtgggattgggggctggggtgtggtaaggggtcaccagcattcctgggggagggtcaggaatgagagggcaaggacccctcccatctccagcagagaaaagagcagaagggggcgctggccaccaggccggttctgccaaggacagaggccccgtgtcctcgtcgtcctcctccaggaaccctccccatctccaaaccccctgctctccagggatgaaccttcccctgctggagaaagctgggccccagggacctggaacagatggaggagatcaagacttgccagcatggcgggcagtgtgttcccagcacagtctgcacccccatccacagccctgggcatctgacagcactcgcccccccgccccgcacccctgcaggcccaccttcctcacccagcacctctcagcagagagcccagcacagcacttggaaacaggaagagagggagagacagagacagagggaggggaagagagaagactcttctgtccagcctggcttctctgcagacccagagcgcccaccgccacccccacccccatcctggcacagctgggccaaggaggggggagcggtaagggaggaggcaggcagtcaaaaggggagtcgtgggaccccacacctggcttcttaccctctgtaactacccctccccgccccagggggggtctcaggccgagtcagggatgccacagacaccacacctcctcaagaggaggaaccaagggctggaagggtgagcagggacccaccgggatcgagggatgccaggcaagcgggcggcagacgggccgcagcgggtgtcggagactgccgcgggcagccggacacgaccaacgggatgctcgtccctccgtccctctgtccgtccagggcggctcctctctgggcggctctgaggccaggcgggcgctgttaaaaagctttttatgtgtgtgtgtgttaatcacatgattgccgttcacctgtatttcgaacaaagacagctcactgtttcaaggccccgaacaagagtctgggcacagggaagagaagggaggcggggggaggagggttggcagcgccgggggtggcgtcgaggaaaactggggggagattgtccaaggccgggagcgggagaaagagaaaacccttatcaaactcctaattcactgggctccgaggccccagacacactggcccgattgtctggctggttgtgtgtgcgagcgtgtgtgtgtgtgtgtgtgttccagtgtccgctccccccacccccaacatgccttcgcctcgtgtgactacctcattgtgtcccattacccaccccctccaacccccttggcctttcccaggcacaaggcctcgcctggaccccctttccagccccgctccagacgcgactccctagggctgggccccgggcctcgcccagccgctgaggagctcagaaccgtccatggtcatcatcgcggcgccggctccgtctgtcctcctcacatacccaacctccgcctcagcacccacctttagagacgagagaggggctgtggtcttagaggcctgtgaaagccttagacgatgggcaggacagaaaaatgaaggagtcaccctgctggagcagtggggtcgagtggagaagtgggcggagaggaagacgacccctcaccctttctcccggtgggggagtggggggtgtcttgacaaccaggactggactcccccaccagggtggggggagttgggtcccaggaaatggggccccagaagcttttcagatctgcttgaagaggaccccagcccagcgggggcccaggctcctgcacaatttagtctgtctctcttgagccaagccaggccttgcggtgctgggtgtccggtgagaggagactgggggagaagccggggcatctgtcctgggcagggggtatccagctgcaccccgcttcaccaggtatggacctgtaatcttcctctcctgctgtctgagaaagaggacagctgggtggggggtaggaggcggggtgagacaggctggcacgcagtaagaggtcttaagtgaagcaacaccggccagtgccaccccccatgtgacagaacggtcacctgccttctcctctgccagctgcccattccgacacctgagacagaggttgggggtcccaggtgggcccaatttccccccaagggacacgttgtgaccctgcccacctgcctccactggctttcctggcctgaccacccccactcctacaccttcccaggatgggcctgggggcagccagcagcgcagggagctggggtggggggtgggggggctggcggaggagcccagagtgttggggatgaaggaaagcgctggaggctccaccttctgccctcccctccctcccctccccctccccctctcccccctccttccttccccagccctcggcagcagctcagcgctcagtcagtctcaggctgtccggccagggtggttggtggtgaggattcgggctccgtcctgacaaggcccgtggcctgaggttcgggggcccccagcccctcccaaccagcccaccagcgtcccccacccccagcccccgagctggaccgcacaccttgggacacggttttccacttcctcaggacgagccctagactggaggagaggtccgaggaggtgagtgagtgcgcagcccgctcctcccttcccggggcccaggcctgagaccctgcggtcgggcgtggggcggagagaagctgacccccgcgcgcccccagcccagttcctcttctagtcccccccgtcggggccaggcggaagggaagaaggaaaggtgagcgaaaaggtgggaaattccaggagccaggattagagcagaagaaagagtccgtttttcttcctttccatcaacaaacctccacccaagaggaggtttttaaaaaaaaaaaaaaaaaaaaaacccgaacccacccacagcaaaaggcggttgggaccaggtgggggtaggacacggaggcgggagctaagaggccgagccccggtctggcatgtgcgggggcccacggggctgcggtgggtttaggggcagcctgccggccccaccttgggactgtgcctgagtcgcgtgccgggccgccgtcggggctgcgcgcacgccgcccatcacgccctccttcccaccgtccaggtgagcgttggactcttcgccaggaccccggcggcgggccccggggaggcggccgaggcggcggcggcggcggcggccgggggcgacatggcagaggagcaggacctgtccgaggtggagctgagccccgtgggctccgaggagccgcgctgcctgtccccggggagcgcgccctcgctggggcccgacggcggcggcggcggcggcggctcgggcctgcgagctagcccggggcccggggagctgggcaaggtcaagaaggaacagcaggacggcgaggcggacgatgacaaattccccgtgtgcatccgcgaggccgtcagccaggtgctcagcggctacgactggactctggtgcccatgccggtgcgcgtcaacggcgccagcaagagcaagccgcacgtcaagcggcccatgaacgccttcatggtgtgggcgcaggcggcgcgcaggaagctggccgaccagtatccgcacctgcacaacgccgagctcagcaagacgctgggcaagctctggaggtgagcgccccgacccgcctccggggagctcccgccgggccctctacccgggccctctacccgcggggggaatggggagaggcgctcacggcctgggcccttctcctggggcagccgtctccttgatgggactggatggccagctgagggcatcgggctcgcccttccgccagtacccccttggggttgcgctcgcgctggtctccagcggcctaggccccgctccccagccggggcactgggctggaaggcgccccctcgcggttggaattctgcccgtggcaggagctggggcctgggcttctgggccgggtgggcgagagtgaaggtggaaaggagggaaggctggtggaggcatccacaccgtagtcgtccactaaccgcatttccgcaggtgccactcaagggtgccactgccccggggtcaagggggatgcgagggaaacgtctgggaaagaactgaaagcctggctggagaggcagggaaactgaggcaggcagtggagaactgcaaggctgagatgggggcagacaaggaattcaggtccaggtctttgaaagggtgagggatggaggccaagccgaccgctgcaggcccctgtcctaccccagcctcctcctctgagcccttctgagctctttcagacccagggcttcttcatctccccaggaaaggggacccatggagaggagactccccctcccaccgggtcccagagctgccaggctggtctcttcccctccctccctctcccagtccaggcgccatcttcctttccagggccccacccaggattgagtaacctcctacccctccagccctggagctgacagccctggccaggagcaaaggctggcccctttcctacccagagtccctcagagtcccaggttctctggaagcagctcagactttgggggaaaaacatgcccctgagaaggaagtcggcctcacctctggtctggggtttaggctgctcccttttgaataccttgttgaccagggcaatgccaccgccccctccccaagaagtcctgggcagctcagaaagagaacaggggctccagaaggtgagagtctgcagaggttacctgattccccgccagactgtccatgagataggcccaggaaggcagagggcccacccaggccatgtaacagctggtggtagagccagggccagaaccaggtctcctgacgcttcagccagtggtcttcccacacaccatcctcggtgacagaagtgggtcaccctcccctctaagacacgatctggaggttgtgcggtgagggcagaggagagcaggaatgaggagcatccgagctgcagaaagtgtcaggggagcccgccacccctccccttgccagccccaacacactggagcttggcctagaaggccaaaggcttaaggtggtggaaggagcaggaaagcccccaagagaccaagaggaattcgcatccagccccctgggcctggccctggccatgtgtttgctaaaggcctggtgcttcttcccctccccgttcaacactcggttcaccccagcaggccctgggctcagtggtcaaactgctgcgttgactcagagggtctagcctttcccaggatcagaggtcaaagccagctcctctgcccaaggtccatccacatcgtggcagggttcagcccaagccaggacccttggtgccatgggacagagatgagcaagtgagagacagacaaccaggagggaggcagacaggcagacagaacaggccctggggaccatgagcagaccacagtgtaagcccagtaagagcatcaaagcaagaatggaccacccccctcccatctctcccccacgctgttgccaaggatttaaggttggaccctccattgtccctgtctgtccctgctcccccagcccagaacccaacgttgggctccctcagagggacttgttcctgaccacccctcacctcaggctgtgtgcacaggggccaacctgagtgtgggttggggggcaaccaggaaagcaggcactgcttactcaggacccaccctagcagtgggagggtgaccagacagtgacaaggatcaaaggctatgccaacagggagtgggctgcttggatcctgggtggggaccctggagacctctggactgcgttaagctagcccacctctccaggagcttctcctgaaatctgcgcgccccgcccctccaccgtctcatgaatctcaggctatcaagaagggggatggctagctgggcagaactggcaatcagaggccctatacctgaaaagagaaagacaggcagattgtgtgggacgctggaagggggtcagtcagacacaccagcgtccaggccctggctcgcaagtggctaggggagtgtgccaactgctaaccttcagtgccctcccaggaaaggcctgttagatgttgagctcatcgtgctgggggttcggtgtattgattgaccctcctggggaggataattagagccaagagacaggaaaggtggggtcacaggctggaacctcccaggacccttaggtgagcgcccacgggagcagggggagcagaaccagtgtgtcctagcgtggaagcccccccgcccccgccagttggggatttcagttcgggtggggagtcagcccaccccttccctctccgtttcagaccttggacccagaggtgaaaagcaaacaagcgttgtagttagagctgtggtgagcgagggctagcgctggagtcaagatgaaatttgggattgggtttctgtggtgggggaggacggatttaagagccttaacagagctgaagctgaaggtctgggcgaggctggggttggatttgggggtaaggttggcgttgggctcaagttaggactggggttggggctggcagaccccacccccacccccaggtaggtttctctccaagttagggtgctggtgggaactagcgctgggaggcgccgatgggtgcaagttggagtctcccctctcttctagcctgtgcccccgctcacactccgtgccccctgccattttcttgcggattcacatccggttgccagtgggcagagggcacggggaaggtttgaggtgggagagggagtgcagggtcccctgctatcctaggagcctatgtgccggggccatggctggttgaggcaccccacgtgccacctctcctcaccaggcacccacctttgggcctgccccacctaccctaggctggctgggggcggggggagagggtgcagctagggtgagaagggctgcatcccactcccagcccctgatggtctgcggtccccatcccgtcactcagctagaggggcccttggagagagctgggctgggctgggctgggctgggccacggcccggggggagggcagccgagcaggctaagctggagaggaatgccgctgcccgctaggaggtgcctggtatgaccaccccctcccatcctgggcagggagggccccgccttctcctgactgggtgaagagggcgcccacgggggaggggggtataggggcagctggagagagaggccctttgggctaaaggacagagctgcttctggagagtcccttaagtctggggatctgggaatcttccccctgagcccctcttcgaagcatccttcctgccttcctcaccaggggtagcccagccctgagcttccctgcggccccagccctggctggagtcaggtgggtgggcgtacagtctgcagggtctgcgttccactggctgggctcagactgggaagagggtctgaatgcccccatccagggtcttggaagataggagcttcctttaccttcctgcactccctcaacaaggagatacgatcgccccttgaggtgggggtccgtgcatagtgaggggcacacgcatcctgcccaccgcggccccaccatgctggaattcacaaaaatgactccagagtcgaggggttccaccgcaggtcctcttgcccaccacctcgcaggcggcgttagaaccgcacctgtttctcggggtgctgcccccaacccccaatccccagtcccaggccccatgcacagggtttcacagccattatcttggccactcccatgcctggaagtaggtgttacccttgttctataggtgaagaaactaaagctcagagaagtgacttgcccatggtcacacagctaggaagtagcagacactgggctcttccccctcaccgtgctgctcctgtttgcacatctccagtcccagggagctcaccccctaacaaggcagccagctccacttgcagacagctttgaagaaagagtttttggtggctcagacggcagagcgtctgcctgcaatgtgggagacccaggttcaatccctgggtggagaagatctcctggagaaggaaatggcaacccactccagtattcttgcctggaaaatcccgtggacggaggaacctggtaggctacagcccgtggggtcgcaaagagtcggacacactaagcgacttcactttcacttttcaaactgaaggaagctctattgtaagctctagtctaaccccatccgcaggggctgcctggagcggcaggctggttcttctctcacaccccagcccgagaggtttgggggcagggatggctgccctcggaggctgtggtgccttgggctcacatcctccagtccctaggccaggcagcacgactaccacccgggaccctgcccgccaggctcccccagcccccaagccttgtttcttccagggcaggcgctcacggtggcccttctgctgtctcccccaccccaaccaccccaccccaggctgctgaatgagagcgacaagcgccccttcattgaggaggccgagcggctgcggatgcagcacaagaaggaccacccagattacaagtaccagccgcggagacggaagaacgggaaggcggcccagggagagtcggagtgcccgggcggggaggctgagcagggcggcgcggccgccattcaggcccactacaagagcgcccacctggaccaccggcacccgggcgagggctccccgatgtcagacggaaaccctgagcacccttcgggtgagcctggggctgggagctcgggtgggaggaggctgtgggcagcggggagaggcaaagactggaggaggacttgagacctgaggctctgggaagggctggctgggctgagttgtggcccagctgggcttcaggggcccagtggcagttcagagggggttcaggggtcaggggaggcggctgggcaagagggctgtggtcaggactgctaggaggggcattggtttggggtgaagagacccgtgaaggaggccggtgggccagttacaccagagaaaggtgggacaggacgattctgagaaacaggagggcagacagaggacagcgcgtggcctctcctccacctccccgtctgacgggggagacacggcatgtgacattgagcacgtggcatggaggagccagacgcagggcgtcctgtttcattctcgttggcgatgagcgcagctaacggtaactgagtgcttgtgctgggcaccacgctgcttgctttgtgtgtgttaactcgctcagtcatctacactgtgatgaggcagccgctgcctgcactcagacctcagctgtgtggcaaatcactcccatgctacagagtagactctacagaaaactgagggtaacttgtcctgtagatgagggctccagggcctctgctggcaccatagctacgtcccttgtgcttgtagcttacaggacaccgtgcttggggccaggctcctggccagtgtcagtgagcagagctctgccttcagaagacacactccgagtcctttgtgccagacctggaagcagacaccaggcgtccaaacgagacgccagggtccctggagcctcctgtcgcccccccatggtccctggtccctcaggagcccacattctatagagggatgagcagtgatgaaagcacatgaattaagtacaggaagaatcaagggcacgtgaagcccatgaagacccagagggagcgtgacctctggggaggagtcaccccctgtccacccagtcagtctccaaaaatatccagctgccagtctctggtcaaggaaagcctccagaaggaagccatgttctcaactgcttggtatcatctctgttttactgataaggaaactgataagagaagatagggggtctgcccagggtcacacagtaagtgacagagcgagaattcaaactcaaagtccagacgctttggccagcacaggactcagcactgcctctggtctgatggaggaggcacaggcctgccctcaaggagcgcctggcttgctagaccatgaacacggtctctgtccgacgggatcccccatccagccatccctccctcacactcctttggagattcaggagtacacacacacaagaccctggatcgtgtacagagccagctcactttattactgtgggcctggctttctcttccccataaacagcccagctactcctcctccccaagcccttccccacatccccagggcagggtaagcggtatcctccactggtctcctgagcccttcacccatccctcaccatagcacctgtgatgctgccctccagccctgggtggatccctggatcccctaccccaagaccaggagcttgtgcagacaggaaccatttgacttctttgtattcccctatgcctggcaaccgtgcctggagcttagcggtgccccctaagtgtttgctgaatggacctgggaaggggcaaacggacagacaaaggaacgggtagcacaggtcactcatgtcagtactttcctggatgggcagggagaaggcagctggagggatagtggggccatgcagtgtgtgatgggaactgagagcgtggtcgggggtgctgggtgggagggaaggtttccttgaataaagggcacttgaggtggccttgggtggagggatggggtgggaggtgatgcatcgccatttggggcctggggtggtggtggtgtgcagacgagccagccaaagtgataagggcttgagaggtgagcagggcgggcaaccagcagaggccgagtgtgcttaagagagcggacaagctggggcctacaggccagactgcatcgggctgcacagctgaggagcgcagggagggcagccgacttcagctggtgtgaggaagacccttccaatggggacaatggaacttgctcaaaatgaagcaggcctctccgggaggggtcggggggcgagagaggggagtcctatcctggtaggagaaaagactcattcctaggactgaggaatttcataaatgactggacatcaacctaagatcattacatagccaaacgccaccgcaggccaccccaaacacgttaaaacgaacaaggccgagctgtgatgggtccttagcctcccggaggcattgcatctgaaaagtgaaccatcagcctctgaccttagttcctgcttcctctctctctctgtctgtgtctcccttcgccctctaggccagagccatggcccgcccacccctccgaccaccccaaagacagagctgcagtcgggcaaggcagaccccaagcgggatgggcgctccttgggggagggcgggaagcctcacatcgacttcggcaacgtggacatcggcgagatcagccatgaggtaatgtccaacatggagaccttcgacgtggccgagttggaccagtacctgccgcccaacgggcacccgggccacgtgggcggctactcagcagctggctacgggctgggcagtgccctggctgtggccagcggacactctgcctggatctccaagcctccaggcgtggctctgcccacggtctcgccacctggcgtggacgccaaagcccaggtgaagacggagaccgcggggccccaggggcccccgcactacgccgaccagccgtccacctcgcagatcgcctacacctccctcagtctgccccactacggctccgccttcccctctatctcccgcccccagtttgactactctgaccatcagccctcaggaccctattacggccactcgggccagacctccggcctctactcggccttctcctacatggggccctcacagcggcccctctacacggccatctctgaccccagcccctcagggccccagtcccatagccccacacactgggagcagccggtatatacgacgctgtcccggccatagggggccccccgacccccgtcaccacccgtcttgccctgccccctcccccagccctcgcgccctgttcctcgcccatctcaggcccggtggcggcagaggaggaggccgcagaggctgacagctgaggggaaggccttctgtctggctcactgcctttgatgacccaccccgtcctacccaggctctggcccaggcgcagccccgggctactcggctgggcagaggagaaggaggtagcttgttgcccctaaactgaaaaatgaggggctgtaccttcccccccaggaatgaccctcgatcccaggatctgagcaggccccgcccaccctcctctgggagggtgaagcacccagggtcggtcggatgggaatcggaggcctagccactcctgtgcctgtgtttcctcttccgcgaggaatagggggtctgacctaacccgtgcacccaggccacgtgtcttaagagcagggccaaccagaaacctgcgtcagggactactg

SEQ ID NO: 218 - DNA, 19825 bp, Hippotragus leucophaeus
  source 1..19825: mol_type = genomic DNA
gagtggtctggaaagcaggcctgcaggcgacccgggactcaagcttccacttactcggtccgcgccgcttgtccctcggcggataacctccgccttccctctcgcagccggagaccgagcgggacccggaggcggggccgcgcggggccttgtaggccgcgccgggaagtacgggcagagagcgcgggaaacgcggcggcgcgcgagggacgccgctgctgcggggcgggggttatgcagcccggcaggccgatcgagcctcggctctccgatgcgagcgcggtcgggtcaggcagaccggtctcgcagggccccgccaacttagaaggccgacgcgacccgatgagactggttcacccacagtcccggctgtcctcgggaggagagggggcgagtttattctagagtctctgaaaaccgaggttcccagcctcttcacacactcgcgcgctcccgggttagaagctcaagatcttggattttaaaacacctttctccccgagtcgtgtccggcggagggtctgcctggccgcgctcccctctccttttaagtgcgcatcaagtggcaggttggtgtggtggtggtggtttatctaagtgaataactgaatcatgttggcgagttgacgggagcaacacgttcagagtgccctagtgatttggaggcactcgcggccgtaccctccgcaggctggggaggcaatcgccctccgatatggcgcgggctgctcccatccgagccccgcttggccggcactcggtcgcccgcccgcgcgcccgcagagggttcccagagccagcccgtgccggaggctgtccgagtccgacttctttccgtgtggagtggtggagcggccagttagtgaatgatggattgcctacgagagggaggctaattttcacgatagctgatggctaaagcaccgacactgtgccatccctgtgaaactcgtggtttgtatggtcatcggttcgctggaacacccagaccctgatcatgcgtacagtgtttccttctaaaaagcactcgccaatttaaaaccaggtcccgagtgcccctcttgctaatcccctctgccactaagtccaattaaatcctctcttttttcaaatctcttctctttcctcctttcttccttcccttccttctttttcttctttcctttcctccctccctccctctgagtcgttcttgctgaatacagcctggtctggtggtgggggtgcaatatacccactccacatctccccagtagggctttctgcttgtagagttggagagctcatttggccccaaagcacttttgaatagtgaagtttccaattcagaggcacctatacacgcccctaaatagtgcacacgtattccccacccacccccacctccgtcagaaagccggtcctgtaacttagagtcgtttttgtggtgtgtgcttgctccaacgaggggagctgaccagtcaaattcgtttgtggatacagaaaggttattttgctttttgtttttttacgcagttttccagttgaaggcaactggttcttgattccctcacctcctgaggcagttagtcactttcccttcatcgtcactcactccacattttagtcagtctgaagtctccccgcatgtcagatatggattgcattacagctttttagacaaattttggaggcttacctacaaaactgtcctcctatccttaaccagagagagagtgaggccacctgagagattttaaacttccttttgactgggattgaatagattcagttgataaaatgtgtaaggtttactcacctttagacacctcagggtactcactgatgccttcctagcttacagacacattcagtcccaaacccctcccttggtggaaaaaggacaagcagttcagattcatctttcagctcattatgaaaaggaaaatagctttcagcaggttgggacctcctttataaattttgacattcaaaaaaatatgacaagggaagcaggaagagaccattcctttattctagtggattacttttgtaatgcaaagttatgaaaccctggaataaacattttacatttgccctctcccactccaccttagttgaaggaggtgtttctactactgactttcagttttgcataatgcccggtacacacaccttgctcttggtgaagaaagtaacactcctcagcctattctattaaaggttgctcttgatttacactctccacttgcttgcttccccaaaatgcacttatacaggcacatttttcttgatccagagcatgcagagatgtacataacttttttagtattgccttgactttcattcctttcaaactgatattaagatgttcatcctgagacataaaattgaatttttgagaaacagccatgtggaatactgtttaattttccattttattgtttgtgtttttcaagttttgcaggaaaggctttaattagtgtctaagtaatagtctccaagaattccttattagattatttcagaccatttgtaaacaaataacattacagtttccaaaagggaaagtagaagctaagatcagttctatcaagagattcatttgagtattcatcttttattttgaatggtttgtaggaagaaagggaggactgaatgaagcagggggcaagagaacccaatgaaaacttgtttttaaaactaaagccatttccccagactattgtcttgccacaagtgacaatacacagaacagaagtcatgaaagtggattactgtcactttggactattggaggcccagagagccctggcattaattcctatagaaaggtagaggaatctagccatcttctcctgcacttctcctgcagcaccctcattgccttagggttcagggctcaaagctgatacagacctcagcagagtctaggtgtcagggctccccctgtgaggggaagcagatgttctctgtggaaccgaggaggaaacagggtggttataagaaccctgagggcatggggcactgtagcaggagggctgtggccaacagtccccttgcaggatagcaatccatgagtcaaagctaactaatagtaaatgaaagagagcctagagtaggaccctttggatgctaaagactaccctctaatttgttctagtcctccccctgggatcccatcctaggttttctgtgattggagatctacctagagaagggaagcatagtaggaaaacatgcctaacccctgtccaacatgcatgcacgggtggagcttgcagagatcagcagacacatctcaagtcctcagtgatctgtgtgactggcttgtgcagttatgcatggccaacagggggtgggggttcgcagggaggaaagcctgttcccccccaccccccgcagttactctgtttggggctggtgtgtttcctcttcccccaaccctccacctcaccccatcagaacgaaagagaattgaaactccattgcctttgcctgcactgagcctaaaaactcagaatttgataaggttactgcaccattgatacaattgcagatttttttaaagcttcctcaaagagacagatgtttgggctgattaagaatcgaggaggaaacctgcagctgcaccaaggaataatctattggacaaatattttaataaaaaatatgaagagatcagcccgaccttgcaaggtcttctgctttaaaaaaatctttatcaaacccctattctatggcttcaataaacagaacccattacctcacggcatcttttgttggccccatacaagagagaacaaaatggttattcaggggaacgctttcgatttttattgtgggtagcctgcacaaagagccgtgttattgtatttaaaagaaccatctgtagcagaaacaatggcatcaaattatctttgaatacccactgaaaaaacataaagcttttttttttattcttcttctgtacggtggggggatagagcagtgttaggataactgacttttttgttgttctctgggtgcattcttctcgctccccctctctctccccctcaccctctctctcctctctctctccctctccctctctctctctctcttttaaaaaatcagccatttggggttttaagccataaacgatttttcttgttgcaggggattgcagtggcaaagctaggctaggtcttggaggctggtgtaaggcaaagcgggtgaaggcaggaggctgatggagagactggggggaagaaaagccgaaatggattcatggtgccttggatggaggacgagaggagaattgcaagctccttcaactcgttctgtccggtgagaagtgatcaagcttgggctgacaagaggctcagggaaccctcacgttcttttgcttttttacctgccaatcaaactgctacaagacaacaccctgatctggcatggacatgtaagtagcttgcaacccaactttgacattcactgctagctcactcctctccgcccaccccccccccaactcactcttcctctcattctttttttttttcttttgacctttaagagatctggaaatacactctgtggcagtcattttacacagatttaagtctgaaagcgttaacttttggaattaaacactaattttgatttctttaacaaatgcagaaatgaaattacattattttattctcttctgagcagttttagcattgaacataatcagttgccttgcctggtgtgtgtgtttccttttctatgaaaatgaagaaatctgtgagcacccagagagaaatgcagaaatgaaaaattcaggcttccatttcaaaaatattaaattctaacatttcatctctaccaagaaccttctccatacctagattacacagagtagaaagagtgatttgagtcaaaaggtatatatcattaaggggctgctactgttttatctggcatcttactattttggtggtggctgaggggaagggtgtgaaaagagaaggaaagggacatggcgacaccttgttctttatgagagattgacactgaggaggctagaaaagcaagagggcaggataagccggaaatattacctgagagaaggaattacagagcatggcgaagctgaaagctaggagggcttctgtgggaagttgtgcgaaggggtgatagggcttgctctctggtgccctctaatggcaatttaaaccaacgtttactttctcaattctacacagaaaagcagctgggtttttgtcgatactgttggtgggctcccccctcccccgcagacttagaaactgtagactatttgtgtaaattaattgttttcatcctggaaacttatgtacgtgccttaaaattatcaatatattctcctcaaacattcgtcctcttccaaaattttgttaagagtaatagaaaaggaaaggctaatggcaaactgacttatggagggtggcccatgcccaattagtaattcgggggaaaagatttctttcccacctgaacaacattctgactctcttaccacagtcgagaaatgcagcgggctggggtgaggagggaagatttggaaactgcagattctgacacaggttcattataatacaattttaaggggtctctcttaggaacctctgttatttcgacatgcggtggtaagggggctttccttcccgcctcctttttctttttcttctttctttcgttcctttttttcctttttttcccccctaaatttggtagataaaggttaatcttgggctgaatgatagaactatgattgacaagagaaaaggtgttgagggcaggtcgcgctgtcttatttacagcccactgcttgctgtagagtctttgttaggactggaaagctaatttagtgctgatcaaaagcaccacagagttaaaggactggtaatgactgctaatttcatttcagcctcatgcatccccaactgctgtaattaaagacacgctatttaaatacaggtgaagggtttttttttttttaagttagggtgggggtgggtggattacaattttatttagatttcatcttacacttgggcgttatgtagtccaaatcaaaaaaattttttagagtcgcttcttgtcatttatatctggctttgcagaatagacaacgtgaaatgtgtcaatcacataaaagtccctatttaaagaaagaaaatgggtaaaaaaggatgcagaggagtaactgttttgggggatttaaatatttgggtctcttttttccccttcaaattaatagaagggccttcgaaatagctaaagtatttgaaacttggggcagggtgaacaggccaaagggatcagtgtcagctttttaagtacttctaaaaagatcatgtgaacagatggaaaaatatatttttaattaaataatttccctcacactgtagctgcagtgttggctcagaaaccatgtaattcccccaccgataggagtctctttatatagaacatcaaaggataaaaagctctacattttcgtagttggttaaaattgataaacccccgccacacacacacacacacacacatacacacatacacacacacgcacacatacacacactcgcacacacacacaccccaaaaaagaatttagcctttaatctctttttatccacgaagactaaagctctgtactcgaccccgtgagcggctctcgccttcaggggctagaacccggctcagatgagaagcggcgctgagccgccgcgcaggttcgagcccagcgccccctgttggacacagtcggagctgcacagcgccagtcctggaaatcgctagaaccttgctctggggttaaagataacatgctttattaccgtccaaaaaggagatgggaccaggaaacaagttcttgtatctttgaaaaataatataagtttaattcaaaaaaaactaaaaggagataacacaattttaattcaataaaaaataaagacgaatctattctccctcctcacatcccggcagccacatcctatcccccgtctgggtttggaactctctttaaagattaagcgagagtaaaataggtagagaagcatgacttgaaagagagagacaaagaggattttcctctgtagcagtggagaaccaaccaaaagttacctctcccgttctgtacacatttcaaaaaaaaaaaaaaaacgaagatgctgttgcgtgctgtattgacgttgtcaacagcatcttgttgccctaagaggttcttcacatgtagtaacagtgtctgactaaacgaaataacttgcccctttaaaaatttattttcagagtgtaattaaaaagccagtctctcctttgaatgtttccattcccccaggccaatcttgatcaaacttttccttttcctgctcgcacttaaattccaggtattctctaagaaacaagtgcctgatacctctccctctctcttcaccaccccccacccccaccccgagctgtaggattccaggaaagctgtgccggcggtaaagagtattttcttttgaaattcagcattttcattgactaggaatccaaatcatcctaggggaagaggagtatttttttacactttcaaaaactacctgtctacataagaaagagctttgactttttctttggtttgggagtgagggcaaaggtacactttgaaatctttcagaaagataactataaaaatgacacatcctctgaatttaaaacagtggggaaacatgggtttgtttaggtgttagatcaaactgaaacgatgtgtgtgctaaatgaacacacatgatcttagcaagatgtttggtgatatggttcttgaggattgtacttacaattctaacttttagataaaaaccttaagaagtttaacgctttcttgcttgctttaagtttgcctattgaaggaaactagcttaattttcataatagaattactttaaaaaatatttaatactgtggctacacaagttgtttttaacgttgatcttacctttgttctcacctcccaccgtcagcagatctgagattgtgttttcagggaaattgctgttgggtgagatgagagatgttttctctccctgattccagaatcaaatcttggtttatgtttctcaatacgtgaattcagaaacagtggcagaaagagattcaaggcttttattcagtttttacctggaattctatggaaatgacaggcaagcagccttttccctccccactttcccccggccccacactttgcttcactgaaagtctagtccccattacagaaatattaagtctgggcaaactttcatgccaacctcgttaaggtgacaaactgtgctctgacagccgcggtccaaggctgcctaaggagtagggagaccaaaaccagcagaatcttggaggtgaccagaatcttggaggtgaccagctaaagggactagatatatgcttgctgttcagaagtgatgtagaatttgcaaaagcagaggctgagatttctctctctccctccctctctctctctctctctctctctctctctcacacacacacacacacacacacacacacacacacacacacacacgcgcgcgcgcgcgcgcgcgcgtgcttggccccccccctcacttctgccccgcgggggtcccaacctactgggagaagtctagggaaggagctgcccctggctgcaagagggcaagcagtgagcccccaaattcccaggacccagggagaaagcacagccccaagtttaggaaaaagaactgaacaagtgggtggcctaggcctggaaataccacccagctctcccagcacagtgtcattgctgtggtttcaggcggcctcagcccctgcaggaatctcacgccccacgctggcaagcaggaaagcagcctcgcatctttggggcctggggaggaggcagcgactgactccttagtagcaggcaaagccgcaatgctggcaacccgctgcgttttctctgcaggagcaaagtgccctttaggggcggggcgggcatttttggtctcttgtcccagtgtccaggccagagcccgcgtctgttggctgagccccctgctttgtaagtagtcaatcttgtccgtttctgagggcgatccaggaggatgggctggcctagctttgggcccactgggtgccaagtcctcagacccctctcccctccatcccgcacacctttcctggtgaatacaaaccctccttctgaaagccagtatatgaggctcagagtttggtagctatttgggagtgtagaaaatgattattaaaaccaagattataaggatgaaccttcatttattattgtttgctcttttactttgtctttaaactttgaagatctttaagttcacttgatccaaccctgagacagacagggaaccagggagaaagtacagcccagcttggacaggagctgaggtatagacagatactcacctctccaccactcagtgggcagataagtgctgccagaccgtgggtcctaatccggggcccagctgctatgtgggttgctgaagggtgttgaaactacaagtacaacttgacaccactgagcccacagtgcttgtcaataatctgtgaattaggtgcagagattgtcaccatagatcataacagtttctgaaggactcattacagcctatcgtgtcaatgatcttcaaattaaggaggggggtggggcgggaggcaaaaggagtaaggagagcctgcaaaaaggaaagaagtgtgggaaggaagataaaagtcagagccccagctccgaaggagcctttaaagattatcaggctagcgatctgagaattccgttgggatggatttggaagcccaacttcatctgagcctaagccaggtctggaagcaggggcgctagggcttgagcagaagtgggcccctgggaaggcagactcttcagacatttcttttgcgagcagaagagctttgggcagagtactccagatgtagaggggaggccttgaagatgacagtccatccagtatgggtgtgcactttcatttacagtgctttccagggctagatgttactgcaaatcttggagcaaagtgggtaacagttttgtttagagctgatggtgattgtacggtgtttgtttgttttttccagtggtttgctttcagtgtattttcatggtaacagcaaagtctttttctttgctagtactcctgtccctcacacataccttaattaagcagatctttcttcccccaacttgctttttggggtgtcagacacctctgccttgtgaggttgttgagttgtcactcttggggaatttgtattatgcctgattgtacttttggaaaggggattttgcaggtaacacaggagcagtgtgcaccatgatatctccaaacggaaggaaattaaaccccactgctatagcttggaagggaccaggctaagggaaagatgttctctccgcttggtgggctgccggtgaaggctgtggggagcccagcccacactttggtgtcatttatgagtcatttaatatggtctagagaaactttaaggaggacttagatttgtttttcacataaaagttgtggtcatagtcaactgaaataatcacatttggagaatctgagacaatcgtctttttcccaaaataggggcaacaatcctagtcactggaacatcaggattctaaggaaaccctgttcctttggtatgattaattgcatgagatagtatggtcaatcagggagatacatatttagactcagaagcaatgatttagaggtgggaaaaggcccgtgtgttttctgggccatttgcagttcttggtgatctatatgctgattttttttttcatctgcttctcctaaatttaatatcaaaatcagaggttctttttttttttcagtgcaaatgaaaactggaggcagctatttacttatttttaattaaactttttatgttgtgttggaatatagctgatttacaatgttgcaatagtgtcaggtgcacagcaaagggattcagccacacacatacctgtatccattctcccctagaatggtagcctttacattttcagtttgtctttttaaaaagagaatttctattttaataattagattatttaatggccacactgaatttttccctgaacaatagctgcagtacagagactgaatcctatgttaaaattgcttgataattcaggagtagaaatgaaatagtgttaaatattttccagaaaatatttaagctggaatgtacagggatatgtgtgtgtatatatatatactataagcaatatgattattattatctacaaccctaaagacatacacaagtgattatatataattctgttgctgtaatttgaaaggggaaatatatttagttttataacaattgagttattttaaaaatgtatttatttcatcagtgggaattagatgaaagaaatgagtataaaaaggaactgaatgcagagtagccctgcattccttaggtttcaagggtccttacagctcttgagtgaaattatttggtgaaattgggtctggactgaaatagcatttgttatccccttattcatttgttatgtgtaataccacttctgaaaattaaatgcaaggtgctgaagggacagacaagaagaaaaaaatatgattaagcaatttaaaattgtcactctatcatgcatccacatgcatatctatgccttagtaaataaaaaggggtagaggtatatgctagtcttttgtatcagctataaacatttattgtttctgttgctgtcagtaatcctccacacttccaaaacctgccaagtttgccaataggaagaaaatgggggaaatacagatgaaagtttttatcattttggaaattgctttataaaaattgaagtatccccctcttggatttccttcctgtgagggaccctttcacaacctaaagcaaatgaagtttggtaacaggacaattctattctaatttttgctcttcctttcagcattctaactttttccagactattctttattgatgttctggggaaatatatggtgctttttttaaggaaaaaaaaatcctctaatacgtttctttctttaccttcattttgtttgataaatgtttgtttgataaatcttggagaatcaagtgttgatcattttgaaagtcttgtggcatgatccagtttggagtgactgaggttttttgcagtttggaagggggaaggaagcattttaaaaattgacttataccagtttccttactttataattctaagttttcttttttcttgcgttgggagctaaatgtcaataaaatctcatcttaccagactgcaccaacgttgtcccaaacactgaaaatcttcctttatttttggcttttaaagtcaggaactttccttgggttgccgtacttctctttttagttgtattcgcttcttacttcccacactgctggtatgatctctttcactccagtatgatcactgctatggtcactttccctggagctggttagaaggttaggattcgaaggaaacatgatttaaaagaagaagaagaaaaaaaaaacaccccttcatttggccaaatctagctcctaatatatttaaccagttccagaattagaaatcctttctgtacattttcttctatttttctctctttttttcccttacataatgaaattaaaacttttggaacccacagttgacatttttcagaaaattgagttatcaaggcagtaattatttcacggggagataaaactctcatagccctaactgtcaaatagggcccttttcagattttaattacaaaataaaattagtctgctcttcctcggaatggtttgtgagtggttaaacagagctttccccccaatactggtggtcgtcaaactctgctaattagcaatgctgagaaattccagttaacaaggacattctccaagactctgcaggttccctgccgtttgccttcatttccataagaagattaagagaggaggggaacacactcaaatgcagatgcagaaaagaagcgttttttaacaagcatcataatagtaagatgcctggctagttctcacctaattactgcaagttaaacctctatttgccactaaggagaaaaaataagtctacagtcccccatctccacaaaattgttagttggcttcagatataacacttgaggagggatgcgggagttcaggagggaaatatgaatgcaaaagatttaaaaagaaaactgagttacacttaatcagttaaggatttggagttggggcctataataaaacaaaatcgaatcaaaatatcctgggcattaaggattcttaatttttaagcttactctgaaagtgtgcagctttttggtacccaaggaagggaaatgttacactatctttagattaagcactttcacattttcataaactgtgccagtggcaacattttaaattctcagaggatgaagcaccctcttccaagtcttattttgattcctcagtagtcaatggtgtattgttattagtactgtagccgtctgttagaagcctaaagccgggctgcttctgtcatctattatgattgttatagttattattatatttaggacccagtgatggtgctggattgaaatagagtggccggtgatctgatttttttaatgcgtatgttctaaaaaatctaatgagaaaattgtttctgctatcaccatcttctttaatcttattttcatagcacattattatgcataaacgccagccacagttagtttattgccttgataagtacagcaggcttaattaaaataaagctgtaaataaatgcaaccaatgataacacaattgtaatgtatttccatagcttatttatatgataaaagcaattaacaaaagacctagccagcccctttaacctcttaaatgcattattatagagttcaggcacaaacacatgcatctgagaatctataaaagcttttatatatcataccaaggaaaaatttgtgcctcttactactacccttgagagagattaataacatttgcttctataaccatccattattagtatttattttaatacatatacaccattatccacatcaaccccttgtatttttttttcttcaaacttaattatccataacctttttttttttcagttttccgataatgctattaagcgcagaccaatgcatacacaatcataaagtgaatgcttggtctgcccttcatggcgtctggacaatcacaattcattcatatgttgaatctcataatttgtacctatttttttccctggtttaacctcccacttatctcgaggttatatgtacatttctaagctaagcaaattaaatccgattcttgtgatttggttccatagcttatacgacatgttaacttttcttttgtttagattacgtccaattagtttgctctcactcccatccccctcatttttttttctttatttccaaacaccttattttaaaggtaaaagcaatagtcttggaaaagcgaatccaccagtagggggcgcaccagccacatccctgaaaccagacgcgctgaaaagccggtggccgccttctgttacccagatcctctcaaccttttctctttcctaactccaggtctctgtttagcttaatattacacctcgaataaacagaaaactttaaagactttaaaacagaaggttctgctttgttttgaagagttagtgtgtatgttttcgaactagcatcatccttcccggattcctgataactaaaactaatcataacttaagggctaataagagaaactacaagggtaggagaggctgattggaataataatttaccaagaaaagtctgcaacttttccacaacttttctgggtttccagtgagcaaacttgagtttgactagaacagaaaagcctgggaaggcagggatcgggaagctggagcggggggttgggtggggggtaggttatgggaagaaggttagtaaggaacaaaacaatgcacagttttgtaaagataataaatggaacgtggccgacagatactattcagtacactttctttgggtgagtaagggtagatcaggggaggagggaggcggagagagtgttatagaagaaagaaaataagtaaccctgatggtttaagccttttataaaaaagaaatggcatcaggtttgtttttttttttatctcctcccgcccccccccctccccgctttgtagtcaagtgcattttagccacaaagatcccaacaagagagtggaaggaaacttagacggggctttgtttgactccgtgtagcgacaacaagagaaacaaaactacctatttgtaacggacgtgctgccattgctctgcgcattgagcgcctacctattgaaatctttacgtcgggacaatgggagagcggctaaaattaccctcttgggtcctgggagggcaggattcctgagcccctactcccgcccctatcccatcctcctccagcccgggcctggccgggtcgctcccttctccagcccaggtcgccttcctcttgccttgctggcctgcacctgtgcctggagagcaccacccccgcctcccaggcccagaacccccttcgagggcagcccagacccaggctgccggggcgatgcggccaccgcggtagaagtcagtgggggaaatgccagggctggttctgctggagtcctgggaactctgcgtgggagggagtttgtgagtgcggctcaaaagccacctccaagcagtgccgggggatgccaggaagttgagactaccctcccccataggccgcacttctcagggcccttctgttgatctttttcttccccccagcccccctttggaaccccgctccactgagatccctctctggggcgggggtggggtgggggcggggagctcaggagaatggggagagaggacgagcgtccccttttgcacggactgagtggaggaagatgggtgggagctgtggccagggtgaggaccaggctgtggtttcctgccccgcgggctgagctgggccgggaagagggtggattcggctgctcacacaggcctggtctgacctcagttttggaggcagccgcacagtcggagcaagctttattaaaaaaaaaaaaaaaaaaaaaaaaaaaaaacagagcatattacgtggaagcaagaagattttgaggacagaacttcttgtcgggacagtgtgagaagggggcgagcgagtgtcggtgcccgtggagcgagccgagcgagcggagaagccagcttagggagaagcgctggagggctggagttgggggaagtgtgcggaggagcgggagaacaatgacacaccaactccagcacagctggtttcccgaaatattagtgggacagtctcactgagccaccttctctgccctgccccacccccccacctcagcttctcgcgtccccctcctcatttcagcagcccgcaccaaaagagtaaattcaagattaagtttgaagaagaaaatatcgtagtcttagggctgtttacccacttcctccgaaaaggcgtgtggtgtgacctgttgctgcgagaggggatacaaaggtttctcagtggctggcaggcaggctgtgggagccgcctccccctccctcccccgcgcgccttccccccgcctccccgcgcggccggcggcgcggcaggccccgccccctttcatgcaaaacccgccggcaaggctgggctcgagtggaggagccgccgcgcgctgattggtcgctggaaacccatttattccctgacagcccccgtcacatggatggttgtctattaacttgttcaaaaaagtatcaggagttgtcaaggcagagaagagagtgtttgcaaaagggggaaagtagtttgctgcctctttaagactaggactgagagaaagaagaagagagagaaagaaagggagagaagtttgagccccaggcttaagcctttccaaaaaataataataacaatcatcggcggcggctggatcggccagaagaggagggaagcgctttttgatcctgattccagtttgcttctctctttcttttcttcccccaaattattcttcgcctgattttcttcgcggagccctgcgctcccgacacccccgcccgcctcccctcctccattcccccccgcccgcgggcccccaaagtcccggccaggccgagggtcggcggccgccggcgggccgggcccgcgcacagcgcccgcatgtacaacatgatggagacggagctgaagccgccgggcccgcagcaaacttcggggggcggcggcggcggcggcggcaactccaccgcggcggcggcgggcggcaaccagaagaacagcccggaccgagtcaagcggcccatgaacgccttcatggtgtggtcccgcgggcagcggcgcaagatggcccaagagaatcctaagatgcacaactcggagatcagcaagcgcttgggcgccgagtggaaacttttgtctgagacggagaagcggccgttcatcgacgaggccaagcggctgcgagcgctgcacatgaaggagcacccggattataaataccggccccggcggaaaaccaagacgctcctgaagaaggataagtacaccctgccgggggggctgctcgccccgggcggcaacagcatggcgagcggggtcggggtgggcgccggcctcggcgcgggcgtgaaccagcgcatggacagctacgcgcacatgaacggctggagcaacggcagctacagcatgatgcaggaccagctaggctacccgcagcacccgggcctcaacgcgcacggcgccgctcagatgcagcccatgcaccgctacgacgtgagcgccctgcagtacaactctatgaccagctcgcagacctacatgaacggctcgcccacctacagcatgtcctattctcagcagggcacccctggcatggcgcttggctccatgggctcggtggtgaagtccgaggccagctccagcccccccgtggttacctcttcttcccactccagggcgccctgccaagccggggacctccgggacatgatcagcatgtacctccccggcgccgaggtgccggagcccgccgcccccagcagacttcacatgtcccagcactaccagagcggcccggtgcccggcacggccattaacggcacactgcccctctcgcacatgtgagggccggacggtgaactggagggggcgggggagacattttcaaagaaaaagaggaaaatggaggacagcaagaaacagcatggagaaaaacccggtacgctcaaaaaaaaaaaaaaaaaaaatcatccacagcaaatgacagctgcaaaagaaaacgccaatcccatccacactcacgcaaaaaccgcgatgccggcaagaaaacttttatgagagatcctggacttcttctggggggactatttttgtacagagaaaacctggggtgggcaggtggggagggcgagggaacggaccttgtatagatctggaggaaagaaaactacgcaaaactttttaaaagttctagtgatacggtaggagctttgcagaaagtttgcaaaagtctttaccaataatatttagagctagtctccaagcgacgaaaaaaaatgttttaatatttgcaagcaacttttgtacagtatttatcgagataaacatggcaatcaaaatgtccattgtttataagctgagaatttgccaatatttttcaaggagaggcttcttgctgaattttgattctgcagctgaaatttaggacagttgcaaacgtataaagaagaaaattaatcagattgggcattttaattgtttaaaaattgtacaaaaggtaaaaattagaataagtactggcaaaaccatctccgtggtctctaaaggggcaaaagttttagattgtactaaattttttttaacttaactgttaaaagcaaaaatggccatgcaggttgacatcgttggtaatttataatagctttttttgtttcccaactttccattttgttcagataaaaaaccaacatgaaattactgtgtttgaaatattttcttatggtttgtaatatttctgtaaatttattgtgatattttaaggttttcccacttttagtttctgtagttgtattttaaagattcggctctgtattattgaatcagtctgccgagaatccatgtatatatttgaactaataccatccttataacaggtacattttcaacttaagtttttactccattatgcacagtttgagataaataaatttttgaaatatggacactgaaattatgcttgagtctttcatttatttggataacattgtgattataacccagctcctcggggaatatactgtgctcagccaagaacagcagagtacctaaaaccttggtattctagtccagtagcatgtgctaatgttaacagcaacaaataaatggctagatgattaattgaataagtactctcaaaaaaatggaaatgcttatgtcatttccaaaacagaaactagggacatatattgtaaacccaccccctccttttctaagcagcatgaataagcatgatggggacttaaactgatttatgccacttgttgccagaaaggagtcaattctgaaaaatttcatgtagcttagcagatggggtattgagccaaatcagaaccaggttggctggttttgttttcgttttcttcacagcacaatggccctttggaaacgtggttatagggggaaatgatgcttcttgtataggaataattgcaaactagacaagcaaagtgctcat

SEQ ID NO: 219 - DNA, 82742 bp, Hippotragus leucophaeus
  source 1..82742: mol_type = genomic DNA
gattgttgtaattgttgtttagatgctatgtcatgatggactcttttgtgacccccaaggactgcagcccccaggctcctctgtccatgggatttcccaggcaggaatacaggagtgggttgtcatttccttctccaggggatcttccgggcccatggattgaacctgggtctcctttagtagcaggtggattctttacctctgagctacctgggaagccccaaagagctcgtaggctcttgcctattgattaagcaattggagtcttcacttttcttgatcctactccaactaaaaaaaaaacaactaagttttctaacatatgctaccaaactattacttaaagtttagtgcctttacattttaaattaatcaaaatgtaaattaaattaatggtcaaagatctctaatgaaaatgttttcagaaactgatgatgtctagatgaccaagatggagctcatctgtggttctgatgtaaaaaccaacgaaacaaaacacactagcactctgtttctgaggaagtcttctcttgctgaaccttggggtcttccattgtaattccggacacaactactaagttacttacactgctggcatgtccaggtctgtgtaagttgccctggagggctttcacactcctaggacggctgtgtaaactttttgaccttgaagatgagaatcccaaagtttggtgtgttttcacagacagtaagttgtccttgtcagttctgtcagtaacagacaagggagagatctgaggggctgttttaaaaacacagttttcatcttccttgcctgtgaaatgtccacaatgctcagcctgcagtgcagcttcggacgcaaaggaaggtatttccgtgctccgagaacgcataatcttttgaacttcaaacttccattccgtggtccactgctgaactgtcgaggggcatgttgggtccccggctgcaccccaattgttagccccgccaaccacctttcttccccgagaatacacaaagcttctggactttagcgttttacaagcgctgaacgtctcatcagggtaatagcggcttgtctttgtttcttccaggggataagaaatggtgccttctatctttgtggtttccactgtcagctgagtgcttttttgaaaatccgacttgttttctccatgtatagcatctgtttgacttaaacgtggggaagtcatttcttcttttttagggactacctgtctttcatcattttcagcgcaaatcccagtgtctgaacctgacttcggttccgagctgcccttgctgttgtcggaggcaagctgacctcggtctggggatgctggcgcgccggtactgagtggcaggcgaaggctgccctggcgctctggggccaggtacgtcctttggtccttctcttctttcccacggaaggaaccggcttttttcctgttcgctgcccccgggggcatgcagaaggaggtatcctcatacaacagctcgtctccgttgaaatggtacctgtacaggctgtagccatcggcgctgctgatgctgctccgcctgagaaggaacgtggcatcacattccgaggaggcccgggaccgcgtctgtatcaggtcagacttgtcgattcccgccaggttttccagcgcgttcaccattctgttagatagttcttccagttgggagaggcgaaggtccacagtctgtagggaagttttcataaagttttctctttcgttgatttcctccaatctcatggacatgttttcaactctagtaaatacaaagggacaggtgtattacaccgagatgaactaaagattaaaaccaaaaattaatgttattgttgctgtatgatttttttcaggctttggggaatcatggaactcggacatatttttaaacgtcacacacgcctaatataaccactgaaaattaccctgaggaacatcaggaaacaacagaagtacagttaacacatacggtgctctttaccattcatcacactgctgctgctgctgctaagtcacttcagtcgggtcgaactctgtgcgaccccatagacggcagcccaccaggctcccccgtccctgggcttctccaggcaagaacactggagtgggttgccatttccttctccaatgcatgaaagtgaaaagtgaaagtgaagtcactcagtcgtgtccgactcttagtgaccacatagactgcagcccaccaggctcctcggtccatgggattttccaggcaagagtactggagtggggtgccattgccttctccgttcatcacactaagtaccttatatatgtattaatacatactcaccgaggtcctactctacgcttgtttaatctcacagcagccctatgaggcaggcagtctttccaacacccccattttattggtggggcttcccaggtggctcagtgataaagaacctgcctgtcaatgtagaaagacgcagatttgatccctgtgttaggaagattccctggagaaggaaatggcaacccacaccagtattcttatctgggaaatcccatggacagaggagtctagcaactgcagtccattggattgctgaagtgttagtgactgaagaacaacaacattttacccatgaggaaatagagtcaaggagagggtaagtaatctgcctaaggatgcacagctggcaaacactggggctccaacatgagctccagctctgctgtcttagctggcacatcacactgcctctgatgataaaggaagacactagcacttaggtttgagagatttgagtatagctgtcagcaaggaatggttacaatgacaaaataaatacattcaaatccttatttgaaattcaggggattcagaaaatacattgttaatagttaagtttaggttcatcacaaattattggaggaatgcaaatcaaaactacaatgagctatcactttacaccagacagtatatccctcatcaaaaagtatacaaataacaaatgctgtagaggggtgtggagaaaaggaaacctcctacactgtcaatgggaatgtaagttggtgcagccactatggagaagagtatggaggttccttaagaaactaaaaatagagttgcaatataacccagcaatcccactcctgggcatatatccagagcaaaccataattcaaaaatatacatgaacttctgtgtttataacagcactaaaatagccaggagatgaaagcaacctaagtgtccatcaacagatgaatggataaagaagctgtggtatgtatagacaaagaaatattactcagccataaaagagaatgaaataatggcatttgcagcaacatggatggacttagagaatatcagactaagagaactaagtcatatggagaaagacaaataccaaatgatatcacttatatgtgtaatctaaaatatgacacaaatgaacctatctatgaaatggaaacagactcataaacttagagaaaagatcttgtggttgccaagggggagagagagtggggagggaaggtttgggagtttctgattaacagatgcaaactagtatatataggatgtataaacaattaaggtcctactgtatagcacagagaattatattcaatatcctgggtaagccataatggaaaagaatatgaaaaataatatatatatgtatataactaaatcactttgaagcagaaattaatacaatattataaatcaattatacttcaatgaaataattttttaatgcaaaaataattaagttcagattatcagataatttacttcagggacaagtagtcatttagctatctgagaaataccaatgaacttaaattgttaactatatttaataattggtattcccgtatgggattgtagggaagatcatggcagattataaatatctgcttttggattttcttttaattcttagatgatcaggcaacagcctgtgaaatcataatgttgcctgaactaaaacctgctaaggttctactgttggccgcattgaacagctgtgctctgatgtgtgggagggtccttggattctattcttaattttttccgtaaggagagcactatttttatgccccttaggaaaccacatcatttgagcaggaaggatctggcttcctggaagtttgccaccaggaggaccgatttcaccaaattcaccatgtttgaggagatgtgacttcctcctttagaagcttccctacagggattaacatacacacactagtgtatatgaaatagatgctcaagataaacctactgtgtaacaccaggaactctgctcaatattttataataatctttataggaaaagaatctgaaaaatatatatatatatataactgaatcattttgctgtacacttgaaactaacacaacattgtgaatcaactatgcttcaataaataaataaataaaaacaagcttccctaccattgggcttccctgatgactcagtggtaaagaacccacctgccaagcaggagacgtgggttccatccctgggtcaggaagatcccctagagaagaaaatggctactcactccagtatccttgcctgggaaatcccatggacagaggagcctggtgggctacaatccatgaggtggcaaagagttggacacaacttagaactaaacaactacaacaaccatagggagcccaactacagtttctaagggttctttctcctcctgcatttcagggaccaacagaagaacttttcactcctaattttccatgacttcaagtccaacttaattttctctattaaatgtcatgtcttctcacgcccttcaaatccactgccacgaggattcattctttttgtattagaaatcacattgcctctggaacagacttgagatccttgaacaaacacaaaattttgagatgaagcagctgtgcaaacttttaaaaataaataagctggtaaaatagagataagtatcttctcaaatcttttctaattctctgcctgacttatcccttgtatgacctaatccagaaaacagcatcaccagccactcagaaaaaggagacctcagactcatctgattctgtcaccctgacatctccctaactatccctcctcccctgtgatgaacagataaccccactgtgcataagacgcctctttaggtgtctcagaaatgcccccatccctacactagccactcccttaactgaagctgtggaggaaacaaagcttcaagatgtgatctaagttaagaatattatttcaaaatagataactgtcaagaacctactgtacagctcagggcactctactcaggctctgcagtgacctagatgggaaggaaatccagaaaagaggtgatatgtgtatacatatagctgatgtgctttgctgtacagcagaaaaaaatacaacgttgtatagcaactataccccaataaaaaagtaactaaatagaatgttatttcaagctcatttttaaatagctacagtatggagacagaacattttatgccaaatcaagggaagttgtattgagtttttagagcatgtgtgaaaaaaggaagaaagaaccaggtgccattcatttctctctgaaatgatttaacagaaaggacacttggaaaactatctccccttccagccttgacttgtaacttttgtaacatgatgacttaagtgtgtttcacaaatcttgacatccatatatggaaatcaaaggaggggtttgcatttcaggaggggaaagagaaaagacagaggaaaccgttgggaaagggtcccatctctacacactgaatggaaggagagcatataagagaaatccatcatttataacataactcacagatacagactttcctgacttttgacatcttaattctgttttcttttcagcacagaacaaaaaactgttctaggtccacagcctacccatgaaataaatttgatttcctctcaaagacatatttccaataatgtcatatttctaaggtcatgttttctctttaaagctatcatatagttagttgactactttttcttttggtgtacagttcttttttttttttaatgtttatttatttatttggctgcaccaggtcttttttgtggcatgcgagatccctgcaccccctgcattagaattgcagtttctcaaccactggactaccagggaagttgctgacccatttttcattggattattttccccttattattgagttttgagagttctttagatatcctgtacactagccctacagcagatatgtgatttgcttgtgtttcctcccagtctgtgcctcatttttcattgtcatagcagtgtcttttgtagagcaaaagttttttcttttgatgaaatccagtctatcacttttccttttcttttatagatgcttcctgcgggttgtactttcagtttcagtttagttttaaaaactttcagtgaaaggattccctgaactctaggtgctgaacaggtatagaatgacatgaccatacgggtagaggtggttcggttcagttcagttcagttcagtcgctcagtcgtgtccgactctttgcggccccatgaatcgcagcactccaggcctccctatccatcaccaactcctggagtctactcagacccatgtccatcgagttggtgatgccatccagccatctcatcctctgtcatccccttctcctcccgcccccaatccttcccagcattagggtcttttccaataagtcagcccttcacatgaggtggccaaagtattggaatttcagcttcaacatcagtgaacacccaggactgatctcctttaggatggactggttggatctccttgcagtccaagggactctcaagagtcttctccaacaccacagttcaaaagcatcaattctttggcactcagctttcttcaccgtccaactctcacatccatacatgactaatggaaaaaccatagccttgactagacggaccattgttggcaaagtaatgtctctgcttttaaatacgctatctacattggtcataatggttacagatcttcaaatatttttgtccatatctcagtatatctaatacctagaggatttaaatttgaatcttataccactaaacctgaaagtagtttaaccaaaatgcatttttgttaaggttctgtaaatgttttccattccattcacataataggcacaacaatctgtaaatcactggaacttttgtagtaacttgggcttcccaggtggcactagtggtaaagaatccacctgccaacgcgagagacgagatgcaggttcactccctgggttgagaagatcccctggagaaggaaacggcaacccattccagtattcatgcctggagaatcccatggacagaggagcctggagggctacagtctatggggttgaaaagagtcggacttgactgaaacgacttagcatgcaccaagagaatatatgcctaagtagggcataactttattgactttcatagactcttatctattaaatataatgtccaggctagtgagaagcagctgtatagcacagggagttcagcctgtggctctgtgatggcctagtggggtgggatgggaggtgggagggaggcttaagagggaggggatatatgtatacttatatctgattcactttgctctacagcagaaaccagcacaacactgtaaagcaattatcctccaattaaaaataaaaataaacaaaaaaaaatgaggtccaaattcacattcttatggtaagagtcctgtgtgtctttgcaaaggatagaacacagacattgggagctctgtagcaagccagttattaaaactcattttttgtacagtcatttttttatgtgaaataatcaccctttacctgcaaggcatctcacaaattatatggaaacgtttccttaatgatagagttaaaaggtaacataaaaacataatattagtggagcaaccaggtccggttcctacttgacaagacccatgtttcaagattgcatggtcatctatgttgagttctaagactattcctaccctgtcatttcattccaggtctatagatcatagagttgtctcatccagccaaaattcagctattttaattcccatctgccacttcgtatggggctgccttttaagtttagtaattgtagggagaacacccagggtggcacctgattgtgcttacttatggagtttttatatgtgaaagactaaacaaagaacaatacttgagtcttcaatcttctgtactcattcttttcagtcagcaaaagacttagtaatcactgaagaatattaagttctctgggattctgtctccatgccacatcatttatacacggcaacttggccaggcacacctcaaacctccttggattctagaattcaggtcatctaaatcattaacctttcctgactctgttctctgctctggccagactctggtcaggccctcagtgaagctcttattgatatcctaggttgtctctcccttacttccaacatagcagtgacagtccctaagccttcatccatcgtgaccaggactccagggctggacagggataaacagggctggaggtgatgtaatatgttttgctgccatttgtgaaccctgacatcaccatggtacctgcactgactggttctcagcagcccaggtccccatcagctgtaccccaagcatcattcactttccgcatccttgccatcaggttgagaggcatggagccacattgacttgacacaatacagagtcacaactgggttgtcattactgccaccaggcaatctcttggttaatgacgttcctaccgtatttcccctcaaggtgaactcagatcctccttctggcttcaagtctgtaatgttgctgggtcattctttctccccattcctactgctgcttcttaaaattcaaattttccatttgtataaaactcttggcctctctctagcctttcatttactcttgacaaaaactgattttctggagtggggaccaggacatgagtgtgcttctctctctctctctctctgggagtctgctgcttgcagggagtgtgggttctcattttgtcagggtcatggagtaagcttagcaggggagaagaccgctggggctgtgggctcctggagctgcctgtgcctgggtggggacaggagtgtgtacttggcaagacctgatccacatcctctagcacaaaatgtattactaataaagctgatgtttttaatctcagtccaatgtctgcaatgatctccgatttggctttcaaagtcacataaggagcaagattgtcatttaccagacacactaaaactccaccacttcatcccactcctcttctatcatctaagcatccttgactcttatgaatttataaaattaagactttcaggtaagctcttcccccaccttccccactcctatgtggacggcattctctccatcagaggaatcaccacctcctttctaagactgatcattctttcaggtctttttgcagttactgtcttgtttctcttcgttatgtctttgttagaagcatctttcttaccagcatcttctcttcctggtacttgggaagaggataccaatgattaccaaaagatcaattgctgatttctcattaagccaacaggaaacccaagaccttcacaagatcctcctcccacattgctccccagtcctggttaagggtgaaggaaagccactttctcctgaaccccctcctctttctctctctggaatctacctgtgattcagccaagaaagcgtcaacaaagggaagtggaggggcaggaatgtgctcccgtcaccctgagaacacagccaagggaaatggaaagcattgtgtttttactacctccccacccgctgccaccagccccagcacactttcattcctcttacgtgtgcaaggagccccaagaggaaaatgcaatttggcagcaacctgataatcacattcctggagccttgatccaagaatggtaaaaatccaaacaatgctgggaaagggagaggggccaggcagggtgaaagagcactgtttccatggtaagtcactgcctgtgattacagtcaagttaacgtataactaaaacgtggaaattaggttataagaggaggcaccttatccttctcatacagaaaccattttttatcctcttgaaaggttagtaattactagtaaaatagcagaagtgtctcaaagttttattgaaagtattaaggccaaaagttggtgtagataacccttcagtttggctggtagaattattaatacaaggtgactaggtgtatgagtggggaggagacagagccgtgcagctgcctggggcaccatccctcctgtggcctggggcagagtcggtggcctaaacacacaccaggaagacttcattgtgtatcatgtattctcttgtaattgctggggcccctgattgggaactatgtgctgacatattcttttgacattgtatcatctttttaagtttctccgtatacacatgtatatcagacatgaaatacatggtttcagaaaactttaatgctcaagactccagggtagaaggggactttcccagtggtccagtggctaaaactcttcactcccaatggaaggggcccaggtttgatccatcgtcagggaactagatcccatgtgccttgactaagagttctcatgctgcaactaaagatcctgcatgctgcaatgaagatcgaagctctccagtgccacaactatgacctgttacagccaaaataaaataaataaaatttaaaaagaatggtgctccagaatccccttaggcatggtccctcgctatgctcatccttcaagtctttggaacaatgtcttatcaattctcatgcactttaacaagcttcagttgcttttatgaagtgatcaaggttcttaaagactataaaatgcggggaaaaaaaatgtccgtagtgtgggttgattgttcttgtccacctttgctagttgctctgtggtgtgcagctgcaggaaacgcaatactacaaagcatagaacaagtccctctctgtccctcccagacctgccttcctctgctaattgactgactcccaagcacaggcaatcagtttgtgtagcttgtaagtgatgatgctgatctcgatgggtagccaggacagatgactgcccttcctgtacctctgttccctgagggtggaaaggtgatgggaaggagcaaggagggcacagccaggatgaggaggtcaagctggggacagaccacccttggctaaggcaacagcatatgtcaagagtgaagagaaacgtccccagcagttatacggccctgcagctggtggttctccccatgtattgcattgtaaaggcacccactttggggctggggaagaactgtcacagttttgtttgttttggtttggttttggcctgggatatttgtgataaatgtcatcgtcacttctttatacaatgtataagcagcatttggaacattcacactatttccgggagggaagcgcattaaaaagccaaaattgggtcgacaggagaactgcaagtgaatgttaaatcgaactccatgtccccctcggccctgatgccccgctcccccggtggccacgcccaggtgcacctctcgcaggttacacggatgcgttcctcgctggaagactgctgctcatcctccttctcctggaagtgctcccggacgcactgctcttcaaactcgtgcagcctcttcagctcctcgtcgctgagaaacagctctatgcataagcagaagaggttaccacgtgagacatcagccaggtaggtgcgtcctagtgattttcacaggccgcctttaatcaagctcattcccctatcccttgcaggcagcaccctgcctcctggactggttatcacacaaagactctttgtaatatcagtgatcatctttccattggagatgaacaactcactttttttttttttttgaacaactcacttttaataaaaaatttttattgaggtatgcacgctaagtcactttagtcgtgtctgactctttgtgatcctctggattgcaacctgccaggctcctctgtccggggaattctcctggcaagaatattggagtgggttgccactcctccagggtattgaggtataattgatttataatactgtgttaatttctgctgtacagcagagtgactcagttatacacacatttttttcatattcttttctattatggtttatcacagggtattaaatatagtttcctgtgctctacagtaggatcttattgtttttctatcctatatataccagtttgcatctgctaatcccaagctcccaactggttcctttcactgaaagttcaaatttcaagcacagagcgtctggctgcgtctgctgggttgcatgacacctaaacagctcactttttaacacaactcaaattgctgctatttggaacgtgaaaccaagcattttctgggaaatgttttccatatattttatggatagaggcacggtagcaggaatattttcccattctccttaagtgtaacacagtaaaacatttggaaaggaacaatgggtttatagagaaaagttattttcaagaactctctcaatttttcatcccctcaggagtggactttcagtgatattaattagtaataaactaacgggtatccaattgtaactctttagaaacttgtccaggatagaaacagaagagtgctgcacatactcaatccacgatcctgttcgtcttggtccccttctcgtttcttcctgcaacgacggctgagacgcatgatgataatgtagatgtggcttaaaatgatcattggtggaggcaggacaggccggtcatgaaatgtcataattagctgataacgctggaatttccacacttggttagatattgacttcacttcaaagaaggtattgctttaaaaagattacaggtttagttagctatattacttaaaaaaatttttttttatcgtgacaaaagtcacataatataaccatatggtcatatagtaaacaaaagtcatataatataatcatattggacctagagtgtgtcatacagaatgaaataagtcaggaagaaaaacaaatactgtgtatttatgcatatatgtagaatctagaaaaatggtacagagaaacctatttgcaaagttgtactaccttttttagcactagaataattattttaatttttaatttttaaagttggagtataattgctttacaatgttatgtatacatgtagctgattcacattgctgtacagcagaaaataacacaaagttgtaaagcatttgtattacttttgattgtgatttcccagaacaatcagagttactcacactgaattgaaaatatgcaataaaatggccttttggttccattctaggaattagggctgacttctaaatgacttgtcttttggtttgcctatcagtgtggcttgtctacattgaagggcattttacttgtataaataattaagaatgaagggtattgagattgttatcccctactttcttgaaaaaccacaccatagtctacagactgctccagatattttatttcatataaagatatgagccgttcaactaagcattttgaagtatttaaactttcaattcagtcataaaactagttgactacagttttttggaactgagttcattaattattgaacattttgattgaaggtgcattatttcggatattaggttggtacaatttttgtcttcttttagcttccagcagaaggcagtaagcctagaattgttggaatcctgatcaagtgtgtggtctacacggggtccttagaaaagccagttaacttctgtcaacctttattttctcatctgttaagtcaggagtgtaaccatattctctccagtgccttggtcagctctgagagtctctatttctgtgagggatttttctctcatatttttcatcttagaagctaaaatagtttttttcaacatttattaaacatggtcgcatcctcaatgcatcatgccaagaggggcaagttttacaagaaactggactgtgaattttaagccatttctttcctaggtcactttatcttctattcagtaaattataagaaaaatatttcatgtaataaatagtacagtaattgtcatggttgttcattggctaagtcatgtctgactctttgtgaccccatggactgcagcatgccaggcttccctgtcttccactatcttctggagtttgctcaggttagtatccagtgtttaccacagcctataaaattagctttgcttttgtgcctctgatcatgaattcaagactcaacttgataaatctttctatctcaagagactttcatctgaggaaatactttcattagatttaaattcataccaaagtgttaaaatacaaactaagattgaatgtaaatatatttaggtgtcaactctttatttaggaatgtatgaattctgattgtggttgaacaaaaaagactgcaaaaaaaaaatctgtatgcatttgaaagccctagtcgattccatgtaaacgccaggcagcctcagaggtttctgagattagactgaaaatctgtaaaagtagtaaatagtaagcacacagtcatcagctgtgacacgcacttgaaaacggcgatgagcaggttcacaagcaggatgttggccactagcaggtagcaggccatgatggcaggcgtgagccaggcacccgggatgcaaggggggagccgcttgccttcctcatcgtactggttgtcaccacaaggagctgaaatgagagtttgtctttttgcgcttgattttcacatagaatggaaagattaacaactgacctatgctattaaagggcctatttctttttttactgtgattttttttttctgatttcctaatcagtaattttctatgtgaaagatatcgactcatacaaaggagataagaaactcatttctgtactcagagttagtcattcttaatttgtcatatttataaatattttctcatttctgctttatgtttttcaatctacagtgaaaatatataatgaaaaaatgtgttcttcatctttaagcagacacatctgtctttatttatttatttatttatttttttaactgttaaccattagaaagtgattgggtcttctaattatgtaatattaagttacgttgtcttcttgatcattaactttgaaaatgattttattatgaggtaggaggtaagtatcctctctaggctcaaattcattaattgactattctgtgctctgaaaaagaatcttttttctctctgcttatatgaaatgctactttgatcctatgggacttattttctgaagaaaaagacaggatgatcctaagagtcattaatgaagtaatatccatgaattcacagtctacttatttttcacttcctattttaaaaaagcattgataccagaaaacaagtatttgaaaccagcatacaactctgggtaattagctgaggaagagactttaattaatacacgcattccatagactagagtcatcaattatgtgtaaacttacgattaatttccatggcgtagactatagagtgattggatagcagcattttatttttttagttttgacaggaaggaagaaaagaaaataagacagttgagagaaatgtcaaacaaatgatgaataatataagaactgttttgctgtgaagaaatgcaaagtattcaagggaattacacattcacacttggaaacagtgatctacttaggagaattgtgcacattattagttctaggaaatatatgtatatatatttcatgaatatttattttatgatgtcataagcaatagctaaagctcactagttaaaaagactgtgaaaaagatgtgaggctactgacagatgatcattttaatgtgtaggttgaccaatcaaacatcccctgtatgccaacccaaatacctcatcagcacaaataaatacaaaattactatgaagtaatcagatcaagaattgaaaatctacatttcccactgttactgaaaatagcctcaagtttgcctcttcattttctgtttttacccaatttaattaaaaaatattacaacttatgtctagatccagggactttttccacgtttatgtatgtttactgaagctaatattcttttgaaagcaaattagatttttatgttctggtttaccaagctacaaacacatctactaattgactctgagataatcatgataaaaatgtggtctgaatcacatgacgagatgcagtaggtggaaggcagttgtgtgaactggttatcagtctcacctagtgaagatacactgaacaaccctgcatctcctacaacgcaaggatgttcaaaaccttctattctaaagaagcttctgcttctactggaagtagtagccatggtagtgtacctggcgctttttgacagaacacaacatgcaaatcgaaacacgcagtgcgaatacgaatatgggtctgaagatacttgttcactgataatgcagtaactgtccaggtgaaatcatgtaagctcatttgaacttcacttccctataacacaagagacactgtgacctaccaattcagcttgggcagagttggggcctgcattccccagaaatccatgtagactgcagttcatctcctctgctaacatccatattactgttgatcatacaaaaatagcacctcaggagtgaggaggagatgcacagctacatggaaaaggagttgtgaagcctgaagaacaggatgacacaaggcactagtcaccttcatgctcactgtctcatctggctgaaataacaccacgagttctatcttggggcagaaagaaatttaggttgaagaaaaattaggatgttggcattgggaccacattcatgtgtagaatgtgctcaagggatgtgagactcagaattccagggaatggttcttagagtagaagattggtgtctcaaaaaatctgtatttcatgatctgccctgatttcttcatacaataattggatgcctatgacagaataaaaaatactttactcccaagttaacacaggctcttccattaatttggaacggatcatctgcctcaggaagcagggaagagaatcttactatgaattctattcttacggtctatctggtctgcaaacacctccccgtagatcatccagtagggcatgtagaagatgttccgggccagtttccaagaaggttcctcatctggatgcaagatggcttgacgggctactccaaaactcatcagcaccactagcatgatgaccacgaaatacagcatgtcaatcatctgaggagagaggaaatgggccaagtccacctgattcactactgtgtgctcccctcagagacttcatgagtgcttaattaggatggaggaagcttctttccccctctccctgccatccatgggctactagttcttgtattccgtgcaacatatacaccttattctagaacattgccactcccatctcctgctctcaatctttcttctcctctcttgtgtgtgtgttagttgctcagtcatgtctgactctttgcaaccccatagattgtaccccaccaggcttctctgtccttggaatcctccaagcaagaatacttgaatgggtaggcattcccttctccaggggatcttcccaacacacagggatcgaactcaggtctctagcattgcaggcggcttctctaccatctgagccaccagtgaagcccctcctctcttgttacccataaacaaattcctctagtaactacaactgcaagtagagaaagagaaccattatgggaaaacaggaatttgtaagggaaactcaggggtaagaagaggagatgtctaagggggtataagatggtgagttgagagtgtatactaatgttcgttcattatacaaatggtgagtcgtcacagtgagtaatgctctggttgctatggatactggccttgtgtaattcttaattttgaacatccctgaagacaagagccctgactgggatcacctagactatatgttccttccctcaaaaccacttgccatacaaagagttattcctaagcttgaaagatgtcctgtcttttaggtccagtcctaacactgagactattttaagtgatgtaaggatggttcattcttagtttcatattctatagcctcttctggataaatgttgccatggatttgtcttgacctcatcccctgcattgcctgtgtccactcagtgaagaatctccctacagtgcaggagatgtggaatgcaggagacgcagattcaatccctggcttaagaagataccctggagaaggaaatggccacccactccagtattcttgcctggaaaattccacagacagaggagcctggcgggctacagtccgtgggattgcagtcaaccaggactgagcactgagcaagttatatgttactccagtctagagtgtgtgatctgaaaactgtctggagttgccgtgggggagtgacctgcacccacctgtttgtctctggcttctacaacatgttaggagattaaccattgggttattgacagaaatacatatacataaagtaggcccttaactcttgtttgtcaactggatttaattaagtgatcagtatgtagaagagcttaaagcaaagaacatttcctataagaaaccaattgctggggaaagatcaaatgaaacgtcacagagtcactcctgaggcctgaccccaggtcctaaccaacagccttgtgcttgcagttcctcatgggccatcagcactaaccatctttccgatcatcatcacgtagggtcccaggtacttgttgacaccaaagatgtccaggacacggatgtaccagaagatgatgtccacgcagtagatcacgcggccgtagcccatgtaaggctgcttctggaggcgaaggatggctccaatcatgaacatggaaatggccacgaggtctgtgatattccaatactcctgcagccaaacttttattttctggcttagtttacccggttctgacatgaggatctgaaaagaaatgccaaacaacaacaaaaaaaaacagggagagtggttttggaagcttaaccttagaatcctgggtatggagggctggagcagcattccaggggcttcccctgaaccgtagtggctcagacagtaaagaatctgcctgcaatgtgggcgaactgggttcgatccctgggttgggaagatcccctggaggagggcatggcaatctgctccagtattcttgcctggagaatcccacagacagaagagcctgatgggctacagtccatggggtcacaaagagtcagacatgactgagcacctaagcacagcacagcagcattccagggcatctggtcccccttcctgctcgagatttctaagtactcatcttcttaggcagataaaatatctagaaagggaaattccacaagatgcctttggattcctagtttcacaaactctcaggaaatgccttctgagttatgtccctctggccataatgaaagcagctgccttttgaccccttttccaattttctggacatgtgccggtgagcccatgttccagagttagtccaggaagaaaccccagagcagagataaacctatttggtcccacagaggggcatccccccacaggagatggagggactgggataggacaggtaaatcagcccagattcctttgtaactcggagatgagaagtcagaggaaagctgagcttcattttctcctgcttgagatcttaccctttcaaagttaccacagcttaaaagaacactttctcagaggctttcctagtgacccaaagggtaaagactatgcctgcaatgcaggagacccaggttctatctctgggttgggaagatctcttggagaaaggaatggcaacccactctaggacgcttgcctggagaattccatggacaagggagcctggtaggctacagtccatggggtcataaagagttggacatgactgagtgactaatacacacacacatctttgtcggcaaagtgatgtctctcctcagagtagaactgaaaatatttaacaagcagcatgcaggggcacacacaaagcaaacatagatgcagctatggtgtgcagcagggtgaggtctttaaaggtggtgcccctttagctatggagtttcttgataggtcctggggaccccaggggtggaatggggtggtagctattcataagccaactcagaaggcattcactagtttgaaaactcatgcactctgacttatgcctgctgccctctttcctataactgagggtggggggcaaggacaatgggctctttgcagtaaagaacagtgtcttagcatagggctggtgctcagtgagctcacagtagcactagagatggcacgcaggccacttgggaagtccctgttgtagcatgcgcagagtttgaatgaagcccaggtagaaaagaaagaagtgtaggagatgggttgtaacattctagacctggcacttttcatttggggctgtcatcagctgacagcatgtaattagctctcctgggaagaagttgccagtaataatttttcagatcagtgaaagggtcaatacaaaaaatatattgcaaaataaataatactgcttctctctcagtgggagaaagaatacaaaattctgctgtgtgttatctcaagttcatttcttcttcggttcagttcagttcagtcgctcggttgtgtccgactctttgagaccccatgaatcgcagcatgccaggcctctctgtccatcaccagctcccggagttcactcaaactcatgtccatcgagtcagtgatgccatccagccatctcatcctctgttgtccccttctcctcctgcccccaacccctcccagcatcagagtcttttcccatgagtcaactcttcacatgaggtggccaaagtactggagtttcagttttagcatcattccttccaaagaacacccaggcctgatctcctttagaatggactggttggatctccttgcagtccaagggactctcaagagtcttctccaatgccacagttcaaaagcatcaattcttcggcactcagccttcttcacagtccagctctcacatccatacatgaccactggaaaaaccatagccttgactaggcggacctttgttgttgctatttaatcttgcagctgtgcccaactctttgcaaccccacggactgtagcctgccaggctcctctgtccatggaatttcccaggcaagaatactggagtggattgccatttccttggatgtaagctttccctttataagctgatataatgagctgaaacctgtaggtgatattagaaagaaaaggacctggcccacactttttctgccacctgcaaagactgccctctcagatatgtgagtttcaagtccccgtgatatgagttgtgcgtgaactggtgtcctttttcaacacttagttgaaaatcttgtttcctgtgtttgcagcagatgtgctggaagcctacccagagatgctggaggcttcctctgggtgggggtgcccagcccccacctgctgcaagggccactgttccctcccacctgcccccttgggcaatgggagcccttacccagaggccccgctggctgactcatgtgggtacgaaactcaggtccctttggtcaagatggaacagactctacagtactgaatacactcagagtcccctgccaatgaggccagggacagattccactgaagccacacctccctcagccctgtcccctcttcaacctgaccacccttctccttctccccgctctcctggaagctctcctttaataaaccacttgcacaaaaatccccacctcagatggaggaagacccagctagtatagggtggttcaaaatcctaagttacaggaaaaatgtcatctcctacatctccctgtctacgttcaattcccagaaaatggagccccaatttgtacccagttggagtcatgggtttatctcaggtacctggcagaattcctgctgcttttacaggccctcagacttgttttttagcactaaacaccatctactctgctttgtgttctgatttccaagttcagtttcagtttgaaacagaaggcatataaatctgcgagggaacacaatcaatttgggattgtgacacctggaaagaaaacatccagggcacttgggatttacatgactcatttttgcaataagaagcaacttatgaggacttctctggtgatccagcagttaggacactgtattttcattgtagggggcacaggttcaatccctgctggggtaactaagatcctgcatgccttgtggccagaaagaatttaaataaataaagaaagaatctacatctgaattgaagtcattggtgggtggggctgggacaggtcttcagagcatcacctcccgaattttctccaaggccaggctcaggatgtaggagatgacgatccactcctggaggcagggccagcgctccatacgcaccaggatgacgtagttgaacagcagtaggtaccccaggtaggatatctgaaagacaaagatcgacagcggtgtctggggtagggggtgggaatcagagcccggaaaagctctgaaaccctgtttacagggggacaaatcttctaaaacaaattttcatttttaggtgcactgagtctattagaggaaaccttccactcacatcacaggtgcggtaagagaaccttgaggcaggttgggaggcattttgtactttagcataatatgcatgctgaaagtccattctctaaatgaaagtatatctgttgctagtgtcagcttcatgggacttcccttatggctcagcagtaaaagatctgcttgccaatgcaagagatgcaggagactcatgtctgatccctgggtcgggaagatccgctggaagaggaaatggcaacccactccagtattctctaggaaatcccatggacagaggagcctggtgggctacagtccaaagggtcacgaagagtcagacacggacgcatgcgtgcacatcagcttcatggggaaattatgaagttgcacaaaattatgataaatagagaaactctgagtagtatactggtatgcctgctacattcctggaaattggaagatgttactgactcctccctgcattgctaatttccttcctgaatcttcccactgctgatggacaggggagtttcgaaagtggggagggtgacgatggggaatctgcccagcacgcccagcagtcctgaggccccttaatgagcagccatgtgtctggtgtgctgcacccacaacagggtccctatctttgaggcatgtagagctgagtgatacaggagtgaggtacggggttgaggaaggtgatctgaagatgagtgaggttgatttactccaaagatgaagaatcttcagctctagcccctacccctctggtccaggccccttctaaagttttggtggtgtgggtaaggtgtgtgctagcaactgatcatttgtgattcccagtctttttttttttttaatggccccttcctgattggttttttttatcaggatacaggcagcatcccatgtctagtctttgcaggaggttagagcgagagttctcaaagttgggttgcattgggaaccccttgtactcagtcatgtcagttgtgttcaactctttgcaaccccatggactctagccttgcaggctcttccgcccatgagattctccaggaaaagaatactagagtgggttgccatttccttttccaggggctcttcccagcccaggaattgaacctgcgtctcctgagctgtaaaagcatgcgaccccactcccctacatctgcaggctgcatttagaggccctggggagacacccaaggcttgtcagcctcttggctccaccctctttatccacttgagctcaggttctgggcctgggctcagaaccacctgggcctcagctggttctgaccagaacagatggacagctgtggcttcaggtgtggctgccaagaggtcgggtgtccaggctctcactggcctgggtccccatgtagccctgagggtgctgtgccccggagctccgcctccaccttctgcctacccacatccatcaccctgtccatcacctgctaatgcccagtcactaatggaactactaatggccaggatctgcctgagatgggctatgccctggtacctggggcttcacaaccctcctgaagactgcagtgatttcaggaggcacagtgtgcccaccacccctgctgggaccacccacaaccagcccagtttccttcagaaccttccaaattgctccagtctctttgccccacttctcctgcccatctgcatgtgtaagactggaccattcttgcttcaggtgaagtgctgtcccagagcaatccagacagtggccacagatagggctgtatgagagtatgtggccacagtttggaggccttgattcattcctcaaatacaggacttcatgctttggattcaactctactttgagtgatcccatcagtcttctgaaaaatagcatgtgtgaacttgctgtctcaatatgagtcatctttgttcattgttagactagaactgtattttcctaagtgtgtattactataagacatttgaaaatccttcttcttaaagaaatagaatatgattatttggctttatgaaatggtatatttagtctagaatgatcacattcctgtatataaatattatctatctaggtccaattttagttgaagatatgagttagtcccacttcatgtgcataattcattttaatccactgatttttttaactttttattttacattggagtgtagctgattaataatgttgtgatagtttcaggtagacatcaaagggacttggccatatatatacatgtatccattctcctccaaactcccctcccatccaggctgccacgtaaatttgagcagaattttccctgtgctatacagtaggtctttgttggttattcattttaaatatagcagtgtgtatatgtccatcccaaactatcccttacccctatccttcccctctggtaaccataagtcagttttttaagtctgtggatatctttctgttttgtcagtaagctcatttgtgtcatttctttttagattctgcatataagggatgttatattatttaattgaggatctgagttagtctcacttctatttgcataattcatcttaatccattgatttttttttaaaagcacttttttgaagaagaagaatcattcctcttgattctcacacatctaaaacatgctaagggaagccttactgtgtaaaaccagaacttgacgatgggggcgttgtagaattcacagatcttggtcccaatggggacacttcgttgctttttgtgttcattctcctcgtccccctttctggagctgacatctgcatttgcatcctgaaaacagagcagagcacatggcaagcagggtgccagatgggaaactcctgggaccctagccccacagtcaacagacaggcaccttcccaaatcaaggattataaaagtgttctgtattctttttcttttacatattattgtgatttattaacaattgaatttttccaacagctaatgacagaagacaacaaaattctgtaaagcaattatccttcaataaaaaataaattaaaaaaaagaaaaggagtaaaagatttgaatagatatttcaccaatgaaggtataaggaaaacaaataaatacattaatgatgttcaacctcaaatgttctgtgttcctgcagtgtctaaattcacggcaagagaaatagcaaccattttgaagatgagggttgatggtcgggggcatcactgaccatattctcctcttctttttctttgccgtcctcattttccttggatgtctgataggagaagtcatcataggtacgaaagtccaaaaacaagatggttggggggagaagaatccccatgataacctaggtatgatgagaaaagtggatttttaaactatgagaactcctgaaaattttcccagtataggtaaaattttaaatgatgagcttcagcattcctcagtaagctagcagccctggagtgggtctgtctctgctctgatggtctgtggctttatttggtttggtatatggaaagaactgcagacactgagaaatgtgaacaaccaccacattgttcaagatgaacagcaagcaggatggtgtggaatcctaacttaaaaagtgaagatcttacattgagtttaaagcaggtaattttttaaagtaaaatatagtaagtaaaaataaattaattagaccaaaatattttaaatagaaataacttagatgtaaatgtgaatatatgggtcaagagttggaagacgaatgtgacacctcaaagaaggatttgtggatgtacttagtgccattgagctgtatagttagatattaaatagtatgttttatattatgtgacttttatcacaataataaaaaacattaaaaaacaaaaaaagaagaaaaaaactcaaaggttttctgaagaagtaggaattctgcctcaagaatgtaatacagaaatcctgatttctgtattacagattctgatttaccagtcctcatactcaatcatgtgtgttgattctataaaataaataaattggttctgttcttctaggaaaacaagaaagaagaacttatcatgggctcagcctagacagcaaaatgatggcctaacctatagatggagacctctgtcattttttaaaaaaaaacacgtttctgtttttattttttaatttttttagccatgctgggcagcatgtgggtttttagttctctggccagggatcgaacccccagctcctgtattggaaccatggagttttgaccactggactaccaaggaagtgccactcttgccatttttatcagtgttgtgctgtgtacctccaatactgagctgtttccaacgttaagtcctaattttttaaaaaactttcccctcagccatccattattaagaacaacacaaaggggctatttctatcatatactaaaaaattatattataaaacactaataattaaaacagtatagtacaggtatatgaagagaccaaacaatggagcagaatggaaggatccagaaaaagattcaaatacacaaaagtcattacttgtgagacaaacgccacatccaatgggaggagtaaagatgactatttaatgcacggtattgagaatctgtgtgatcatctataaaataattaagttgaatccatatctcacacaatcactagaataactgtctagctcaataatttcatgaaagaaaataggggagggggatgcatagagagacaattaaacaacttagaatcatcacatgagaattctttcataaatggaggagaaagcctttctaatgatgtccccaaatcaagacacaatcaaagcaaagatcaatagatttcatacttaaatcacaaacttctgcccagcaaaaacacatatcacaaccacaggtaaaaaaaaaaaacaactcatgggaaaatatacttgcagctcttgacacaggcaaaggacaaatctttctaattagaaaagatctcctagacttcaagaaggaaacttctaacaacccagcaaaaaaaacgggaaaagcagtgaacttagggacatttgtatttacagcaaatcagttcattttcactcataagagatattcagggactcttcgggttgtccagtggtttgatccctggtcagggaactaagatcccacgtgcagtatggccaaaaataaaataacaataaagaaactgatagcatctttaaaaaaggggtgggggggagacattcaaagaaactatgcaaagatctcattttttaccattagattgtaaaaattccagtgtgtgctcacacaccatattggtgggattgtgggaaaactctctgcacaatggcagggggtacacttccacagaaggaaaggctatcaagatcaaaagtccatatccgcatggggccaacagctccccttctggatgttcacctagcagacatgtgaggcacaatgtgtgtccgagagcagccatggtggccatgagtgtagcaccccagggctgagtgacttgcactgaggactggcctgagctgtgacagtcgctgtaaaggaaaacaggggaagcaggtaagcatgaaggaatgttctgtgtcgtaatacagaaagagttcccagagaagtggaaaaaaggtacgtaacaatgactacgtcaacctttgtgaaaaagaaaaacagtaagtatatttaattcaccatgaaaagaaaagagagtattcatattcgctttacatatggaaatatacacaagaaacaaatatcagtggttgccactgggtggaataggtcacatgggggacaggagttagcagagagacttgtcacacttttaaacaattttatttttatttttttgatgtgcaccattttcaaagtctttattgaatgtgttacaatgttgcttctgtattatgttttggttttggggcccagaggcatgtggaatcttagctccttaaccagggatggaaccagggattgaacccacacttgaaaggtaaagtcttaaccactggactgccagggaagtcccataaacagttttaattttttaatatatgcatatgatatgaacaagtcaaagaaataaaaaaaaaaatcctggctttacaataattacatatttatgttgcaaattaaaaatgctttgaaggaaatttgatgcttacaaatatttatacctacaaatagacattatatcaaaaaaaaaaagcattaagttaaaaaaagaaaaggaagagattgcaaaacacccaccaaatgtcaaaaacttagtacaaaaaaagaatatagactatctcattaatgatatttttccttttgaaaatattttgtacctactggtttaaatcaatatattattaaaattaacttcaggacttcccaggtggtccagtggctaagactccgagctcccaatgcaggaggctcaggttgtctccctggtcagggaactagattccacatgctgcaactaaaaggtcccacatgcctcagtgaagactgaagatcttgcatgctgaactaagacccagcgctgccaaataaacaaataagttttaaaagttaacttcaactatttcttttttactttttacaatgcacttgaaaaactttttatagctattaaaaatctttttgtaatgggaatatttaaagtttaaatttaaatttaaagtacatatgtgatttatttctgttggacagtgctgctgaagacaatacagtttaatctcactctttaaattctggcatgtttaaaaattactttttagtatatatattcaactccttttttttgtttgttttagctgtgccaggtagcatgtgggatcttagatcccgaccggggatcgaaccagtgccccctgcattgggaacctaaagtcttaacctctggaccaccagggaaatcctggtgaacttttagtatgcatgtaccctgtttgtttatggattgaagagctggaacatatggacctgtagacttgatcacagagtggacttgggggtactcctctgcctttcttattttctgccacttggcagctgcatgctgaggctggaccagaccttggttgttttggttttgttaagttttattgaagtataattgattaacaatattgggtttaatttctgctgtacagcaaattgactgttatacatatattatttttcatattattgtccatcatgatttattacagaatattgaatatagttccctgagctatacagtgggaccttgttgcttatacatactatataagctagtttgcatctgctaattccaaactcccaatccttccctcacccaccaacccatcccccttggcaaccacaagtctgttctctatgtctgtgaatctgtttctggttcgtagatatgttcagtatagaggttcttcaataaactaaaaatagagttgccaaatgattcagcaggccaactcctggccatatatttgaacaaaactataattcaaaaagatacatgcaccccaatgtttgttcattgcagcactattaacaatagccaggacatggaaggaacataaatatccatcaacaaaaaaaatggataaagaagatgtagtacatatatacaatggaacactattcagccataaaaaagaatgaaataatgccatttacagcaacatgaatgaacctagagattacatgggctgctctggtttttcatcagtaaagaatctgcctgcaacacaggaaacgtgggttctatccatgagctgggaaaatccaatggtgaaggaaatggcaacctactccagtattcttgcctgggaaatcctatggacagagaaacctggtgagctagagcccatggggtcacaaagagtcagatgcaactgagccactaaacgacgacagggattatcatacttagtgaagttagtcagacagatatcatataaggtcactcacatgtagaatctagaaaaagaatacaaatgaacttatttacaaaacagaaatagactcacagacatagaaaacaaacatatttaataaagccaaagcaaggaaggataaactaggagtttgggattagcagatacaaactattatattaaaatacttttaatataatattaaaactattattacataataattttatgtaatattacataatactatgtataaaatagataatcaacaaggacctactgtatagcacagggaactatgttcaaaaacctataatggaagaggatgtaaaaaggaatctatatataactgattcacttcgctgtatacctgaaactaacacaacattgtaaatcaactatatttcaatgaaaattaataataaaatgatagcaagtactttcagagtcataaggcaatctgtagacacagagctcaggtgcctgccttagtggtgggtggatggtcaggggtgcacaactcattagagtggactccatgcccacaagctagtcttgctgcgggttgggctctggtgttagaccacccgtgttcaggtgctgcccttcaccttacagctgggatcctaggcgagtcccttcatctcaaaggttcaggttccccatctgtaaggcaaggattgccacagggtctccctcccggggttgttcagagtcatggatgaaataatccacagaaagtgtttagctcagccgggcagagagtcagagcccacaggtgtcacttgacactacatagccacgtcacaggtaccttcaggccagggttcttcctcatccgcagcctccccatccacatgtctgtcagcagcatctggctgcaggtgtgggcaatgaagtcccggtgtttggctgccacagccagtttgaggcaggtcgaattgctccagtttttcagctcgtacgtcagtagtttcatggcaatctgctcatcgtgcttgtaggactggtccaggagctccacagccagctggccaaagtctctgccgagacacagatggaagcgggcgaggcagtgacagccacacactttgttagagagccatgtccatggggacatcatggagccacaggacacagagtccttgactccctgtcctctcccagcagggagctcccaggacgtccccaaggggacagccaggggccaggggccgtgctcagccatgttggaggctgacttccagaggccccgtgaggacaagtcggcagattaataagtctggggagccttggcttagagaaagaagtgtgtccacgctttcattagttttatctccaggagccccaccgagttctcacagggaagatgggaggagaatcccctcatcctgccagcctggggagggtccattctgaactatgcccagagcactctgttcttcctaacaaagcctgccctggggaaaactagttaaccagagttcaacctattggtgttttatcagagcctgactgagctgagggtagggaaccctgtagccatcctgtcctacctaagaggtctttgggaagatcaagtcccaaagggttgtactttgggactgtactaaagtacagtactaaggctgtactcctctgaatgtgtgtttccttatgaaaatcagttttgttgtctttgcatttaaattgtgtttcccagaaaaagaatcaaggacatagagaacacagcagtgattaccaactggaactgaggaagggagggggtgggtaattgaggttagcagacataagcttttttatatagggtagataaataacaaggtcctactgtatagcacagggaactatattcagtatcctatgataaactataatagaaaagaatataaaaaataatcacatatatatgtatacactttattgtacagcagaaattaacacattgtaaatcagctatatttcaataaagatatactgtctaaaattgtttttccacaaatatcagatattaatgttgtatatggaatctagaaaaatggtataattgatcttatttgcaaagcagaaatagagaacagacagagagaaaaaatgtatggatgccaaggaggaaggaagggtgagatgaatcaggagattgggattgacatatatacacaactaggtataaaacagataactaatgagagccttaactgtacagcacagggaactctactcagtgctctatggtgatgtgaatgggaagtaaatccaaaaaagaggggatacacgtataagtgtaactgattctctttgttatacagcaggaagtaacacgacattgtgaagcaactatgctgttactgctgctgctaagtcacttcagtcatgtccaactctgtgcgaccccatagacagcagcccactaggctcctctgtctctgggattctccaggcaagaacactggagtgttgccatttccttctccaatgcatgaaagtgaaaagcgaaaatgaagtcgctcagtcgtgcccaactcttagcgaccccatggactgcagcctaccaggctcctctgttcatgggattttccaggcaagggtactggagtggggtgtcattgccttctccagaagcaactagactcacataaaaattaattaatgaaaaattgcatttccatagtttgcacaagaagacagtcaacaaaaacaatgatagtccagaaacgcctcagaaagacagaaggaaaaatattaacacaatggacaaagcatttgatgaacaagctttaacaaagcatttgatgatacttaagtgagaaccatatttgccacccttcctggaaaaggagtggttctcagaacaaccaggtctccctgagctctacgttccctccagacactcactttgagttgttgtccaggtcctgggagatgtcatccaccagctcactctcggaggactcgtgggccatggacttgtagagcttgcatgccaccagggccttggccatgctctcctccccccgctgccagaggaagaccgccatcttttggcgcttcatcagcacagcccacaccatcagctcgtggaaggggtactggaatcgactcacggccgggtcatccacatcaatgtccaactcctcctcccttttctttttcttctttttctttcctttggctggcggctcgtcatcctgaggggagagaaacacccttactgtggttctgccataaacatgtagtaaaggaccaactggaagaagggaaaccttgctgtctgcaggaacggagagacttcttaagtacatctgtgtgtccacccatcttatgaattcttttgaaaaggtgcacatgtttattatgagaagtaaaccattgaaaatcaaatgagctgaaaaggcatactactgtttgaagtttatattcctgggttggcaggtttgtttgtttgtttgtttttcaaaagcctctaaaaattgaagagaagctgcaaaactgaaaacaaagaaaacacttcaatccaaatcaccctatgggagagataaagcccaaaactcatttcctgagggatgtctttaaataccaacactctgaaccagagagtaataggaaaaatgtagaaagaggtggagaaaaatatcttggttttctaccagtggtttgggcttcccaggtggctcagtggtaaagaatccacctgccagtgcaggagatgcaggaggcaggggtttgatctttggatcgggaagattccctggaggaggaaacggcaactcactccagcattcttggctggagaatcccaaggacagaggagccggaaggcctacagtccatgtgatctcaaagaatcagacatgactgagcatgcacacacgtctaccaatagtttaaggaagcaggggttctattttgaatgagatttgtcttctcatggttgtgttataaatggaaggccaatgctttccacctccaatggattatgaggggtcattctagtaatagagcaggatcctaaaggaaggcattcatgactgggaaaactggtggtgaaacatgcatgtggcatggaatcattcagaaaactaagatcatggcatctggtcccatcacttcatggcaaatagatggggaaacaatggaaacagtgacagactttattttggggggttccaagatcactgccgatggtgactgcagccatgaaattaaaagacacttgctccttggaagaaaagctatgaccaacctagacagcttattaaaaagcagagacatttctttgccaacaaaggttcgtctagtcaaagctatggtttttccagtagtcgtgtgtggatgtgagagttgaactataaagaaagctgagcacagaattgatgcttttgaactgtggtgtcgaagactcttgggagtcccttggactgcaaggagatccaaccagtcaatcttaaaggaaatcagtcctgaatattcactggaaagactgatgctgaagctgaaactccaatattttggccacctgatgcaaagaactgactcatttgaaaagaccctgatgctggaaaagatcgagggcaggaggagaagaaaatgaccgagaatgaaatggttggatggcatcactgacttgatggacatgagtttgagtaacctccaggagttggtgatggacagggaagcctggtgtgctgcagtccatggggtcataaagagttggacacgactgagtagtgaactgaactgaacagactattccaggctgaggatccggtacccaataggataacagaaatggatctctgctcttttgcaaatagctttctcatcagtgaccttcttttattctcacactgatcctgagaggttgttaatgtcttctagtcagtcagatgaggaagttgtggcttaaaggctgaataatttacccacattcacatgaatggagaggctgggcatggggcggaaaagggggtggagcctgagtcttcaattcttatggcaagtagttcatgactaaaccaagttttataagctcattatgaggtgttctgatgtttttattgaaagtatcatatcttgccttgaatttaaatgtttttgttctaatttgtcccagtaaaactgcagtttcagtcatttagggaatattgaaattaaaaaagaaatatagctttattttcaagattatatcaagtcaaataaaaatccactaaggactaatgaaatattgtaaaacagaaagctttttttttttttgctacacttcaaaacatgcaggaccttagttccctgaccagggatcaaacctatgccccctgcagtggaagcgcagtcctaaccaatggagtctgccagggaagacccaaacagaaaccccttttatcctacctttccatagtatgttactaaaatattaattatatgcaacttcacataaaataattttaatattgctatagacagaaaataaccaacaaaggattcatttccctaaagtgcatgaacagacacaaagcaacaagtaaaagacaagcaacccaataaaataacaagagatatgaactgaaagttaagaaatgaatccatccacaatcacaaatcacagtaagagcctctaaacacacctcagtcagaaattaattggaaaaaaactagtacatatagaagcaaattgaatactaaaattcctaagtttgatctgacagcatgctgaaagctaaagtcgctcagtcctgtccaactctttgtgatcccatggactatatatagtccagggaactctccaggccagaattctggagtgggcagcctttcccttctccaggggatcttcccaacccagggatcaagcccaggtctcctgcagagaagtatataattttgcccaacaaactgagaaaatacatttgtttcaccacacgtggatcattaacaaaattccagctggcattattcctcaattcttttgagattttcaatctcaacaagttctaggtattggaaatcatacagtctacacccaaagagtaatactagaaatcaatgagactaagataaccacaataacaaaagtctgtatgtaggcaacttaaaatatgcttataaataactcttggattaaggagggaattataaactgtttagaaatgaatatcaataaaagttctacttactgtaacctgtaggagaccatgaaaaacaatgctcagagaaaaatgtatactcttcatgaatttattgaaatacaaagaagattgaaaatgggcaaacactttcaaattgagtcaataaaaataacacaataactccatacaaagtatatggaaggaatgaatacaaattaaaatatattaataaaatagaaaaaagaaaaaagaaagttgctgggttaagcaaaaaaataccagtgaaatccaaagacaggtatggttaagaagaaagggagaagatatgaaaaagaaaaaaactggaacaagaaatggcacacaactaaagagactgagtagattgaaagaattaaaatactcagtaaaggtttatggggcttcccaggtggctcagtggtaaagaatccccctgccaatgcaggagacatggtttcaatccctgggtcaggaagatcccctggagaagaaaatggcaatccactccagtattcttgtctgggaaatcccatggacagaggagcctggcaggctacaatccatgggatcataaagagtaggacacaactgagagactaaacaacaacaaagatttacaccagtgaacctgaaagtctagataaagtaaattgttttctatgaaaatataactgaccaaagctgactccagaaaatagaaagcctcgatgaactcttattataaacgttattactacagtggtgaaaaaatgggcctctaacaacaacactggacaggctattatataggagagttccaccaaggcttcactcagcagataaaccctacgtgatacaaccaatctgagagactaagggattatgcaacactgactttcataacccttctagttatgctgaaggtcggtgtcaatgcgaacaagaaacaaaaccttccaccctgaatccatacagaaattggaatgctacttaactcatgaatttattggagaagaatctttataatactcagtcttaatattgtgttatggtacttcttctacttgtttacgtattttcatgtctagtgatttgttcttaagttcacttgttaggttatttctggatatttttgtcccattatgaggaaactttgttgattttcctggactttctagatacaaaatatttttctgccaataataatttcctcctccttttatatattcttcctttatttatgttttcatgtggtaaaatttccagaacacttttaaaaaccagaggggataatgatgccaacaataatgggtgagcttgatttgttcttgattttaataaaagtcagttgggtggcttttaccttttaaaaaaatatctatgacctttgaatataatctgactaaatcatccaagtaaatcttggtgtgtggtgaagtggatttattcatggaaaacaaattcaatcaattttatgttaaatacaaaatgaagtggctccatgataccatgaaaccactggaaacaagtcctacttacttccattcccagaagtttgagagctttcggctgcataattaaaagggagggaaaaaaattcaatggaatcagataactgaagttacaatactatgagttgtacattattgatatcgctagtagattgataatagattaaaaagtacttggggtagggaggtcaagagggagggaacatatacatatagctatggtggatttgtgttgatatatggcagaaacattgtattgtaatattgtaaagcaattaatactgtataacacaatattataaagtaattatcctccaattaaaaataaaatttttaaagtactttgtataattaacaatgaaggacaaaactaaggaaagcatttgtccttcacagttagtgatataaagtactcttttatctattaaaatatattttcctttcctctacttctgtcagcccaggtcaggtgaggagagagacgtgcagacatgggacccccacctcagggagaaccacagaagttcacccacagaaacgcagacacagagccatggggctctgagtggggcgagaggagggcttcatgggaggtctcacacatgagctgggcatgggatacacatggggttttgaagtggggaggtgcggctgacacattagtggagtttgttctgaaagtggtacatggtcacccacaacagggtgtggataatgagggagagccttagacgctttgatcatgagcttgacagtgattcctcaggcactggggagccttgggagtttgtgagcaaggaatgccccatcaggttcctcattttggaggatcagggtggctccagtggtaggatgcatggaagaaagcagagacaaaggagcccaggaggaagcagttgtgaacaaaggaaggggcaggtgcaagtgctgggctgtgggcccaatgtgtggagggaagaaaggatgcttcacaccgagagccactgcaggaggattggaagatgtgtgtggggatggggtgatgagcttggctttgaataggctgagttactgtggaggtgagcaaagaaccatgtgttgccctgggaaccacagaagactgcgtgtccgctgagctctaccctcttgggtccaaacaggttgttgtagagggtccggaagctcttgcgcgtgtagttgcagcggtaggcaccacccatgaggtactccagaacgagcccaatgtctatgaggctgatgtggtagtcaggaggaaggttgccctgtaaggaaaggagccatgtctcaggccctgcaagaagctcctgcagcctggactgcatcacacaccttggcgtcgtggccatccctgctggtgatgtggatgttaacagaagcaatggggcgttaaacaatcttctatctgttaccacaggatgcagggagataagagggtgaaccatgttccagaaaatggattaaacttccccatgagatgagttagaaacccgcagggctataggggagaggtctgggcttgtctgtgggcttggacagaatgatcagtaatgtgcatttaaacataaaggaaagagggaccttcccagtggtccagaggttgagactctgccttccactgcaggaggcgccagtttaatccctgatctggaaactgaggtcccacatgcaacagagtgaggccaaaaaataaaaataaagaatatatatacatataaagaatgtatatgtatgtataactgcatcagtttgctatacagcagaaaataacacaacattgtaaatcaactatacttcaacaaaaatttgattaagagaaaaaatcattgagaacagatggtgtagctggtacaagccttccttgatgtgaatagatttgccctgttgagaaggtgctttgacagctgcttgcaggggagaaggtgtcttcaggggctggtgtccagattttctacagaaggtgggagtgagcacatgatgggcaggaggactctgtggaaggtagggggaggacgggacactcctgggactgggacctttatggagaaatctccacatggtgccccaggattttctgagggaccccaaaggtttcagtaagaacacaaactccctgagatggctgggagttggtgaaggggcagagttctgctgcataatggatgaggctgtgttaagatgaaggcagggtgtgggcagaagggagagggactgagggcatccatgcacctgtaagccagtcactcacgcccctgggcagctggctgatccaggaggcagagctgacccatctgttataaggtgaaagtgaagtcgctcagtcgtgtccgactctttgtgaccccgtggactgtaacctactaggcttctccgtccgtgggattctccaggcaagaatactggagtggattgccatttccttctccaggggatcttcccgacccagggatcgaacccaggtctcctgcattggaggcagacgctttaacctactgatgctatactatgtactatttctggcttagttaacttcctgtagctgaaatgatggtggaaatctggggtccatcccatggagactccgttgttgttatttagtcactagtcatgtttgactctttgcgactccatggactgcagcccaccaggcttctctgtccataggattctccaggcaagaatactggagtggttgccatttccttctccattcacggagactacacttttcgaatgtcctccttgtgcacagggacctcatccttcactcaggctttgcaagtttgttcagccctcatcgtgatccttgatcaagtcagggatttcacatgaggggacaagatacatctctgcctcggtgagcttgttgtttgtggcaggggaggggattaagggccaagccacccaaatttcgacacgcagcatgttcagacccccactctgcctgggtaggcaggtgagaaggggcttcctggggagggtgacactgaagcagagcagaggctgctgcagccgagggcagagagcaccgcagatatgaccatgcttggccccaggacagaacacatgagcgtgtggtggaccccgtatggtgggcatgtgatgggcccagttgatgcaagtgtcttagatggagccttaacttcgtgagatgtaggaggctttggctttcaagtgagggcgtcctcctggggagggcaggaggaaaatgatagaagccacttaggtgagacctggttggttgggtctacacttgagtagcagtggcttttgactctcagtgctcccttagttaagaaatctgggaaagtgggaaacaagggcagggcagtccctggtccctcttggttcccagacccaatgattctgctctgatccaatgagcatttgtgagataggctgggactggggaccctttgatgcaatgcttgcacctggacacacctctccttgaacaacaaaatacaaaggaactgtatgggactaaaaataatcgcatacatgtgcacttggggcaaattctgaacccaaaagataccgagagaccaaacattataactgcctcttttgagaagcctggggcaaaagcagggtactgtccccttcatatagcaccatggtttttccagtcgtcatgtatggatgtgagagttggactgtgaagaaagctgagcgccaaagaattgatgcttttgaactgtggtgttggagaagactcttgagagtcccttggactggaaggagatccaaccagtccattctaaaggagatcagccctgggtgttctttggaaggaatgatgctaaagctgaaactccagtattttggccacctcataccaagagttgactcattagaaaagactctgatgctgggaggggttgggggcaggaggaaaaggggacgacagaggatgagatggctggatggcatcaccgactcgatggatgtgagtctgagtgaactccgggagatggtgatggacagggaggcctggcgtgctgcgattcatggggttgcaaagagttggacatgactgagtgactgaactgaactgaactgaactgaagaggtgaacagaccacctaagtcacccttccagcccgaccctggacacacacctactctcactccactgcctaaggaaccagcttgcccttcctcagggagcaagcaagggaaactgttggttgttctcactccccattgctgcagcaagaaccccaataaagcctcacctgaattccttgcctggcctctagtcaatctctgttgactggggaaggtcaagaagccaggttggtaacatttgtagtaaaagccacattctcacatcagtagaatcagatatctatttgaagtctgaacagtctttctgggactctgactgaaggcccttttctcccgtttgagttgttccctcctgctcagaacacgaacacccatcctgcactccgcatgccaggggctgcgttctggcctcatgaatcattctatgttaacctggtctgatcctccagcctgtggtggccaacaggaccccagaaactccacgacagaacagggagtagatggaagcctacaagactataaggggttgtcgtgatggaaaggatgatggggccgtgaagtggaggtatctatcactgtctaatgaggaaacagggccaagaagaactgttgcgtgggactgtcctgctaggacttctggaaagaggcatagggaaggagtgagggcaaatctgaaacttgtagagcatgggggccctgggcagcagagaggaatttgctgtcctcccccacctccacccctggctgggatcaacctaccaccaaatagttatttagtgcaagccgattgtgtgtgagatgaacaccaaacttgaagaagatgacatttgaaaaaagtaaactctttttatggagagaggaattcgtgatttcttatgcctccaataaaatgacaccacatttggaaatttaaaaatggctttagaaaatgtcttattgaaagaagtcaacaggtaaaggaatagagaacagcagactgagacttgcctgatggtccaagggttaagacaccaaactcccgatgcagagggcacaggttcaatccctcatcagggaactagaccccacatgctgcatggcatgcagccaaaaattaaataaaaaaacaaataaaccttgaaatagctcattcaaaaaaattatatatataaacaaaagcaaagacaaaaagagaagactgacctttttaacatccctcaccagcaaatgaagtgtattgggtggacccagtctctgaaagagaagcattcagccatattaaatatgtttttctcttcaactcttagagcaaaatccgactctatagaattaatgaatttgtgaaagctgggatgtcatccactattagcctatgtctttacaacacaggactggttgtgggtaagaagtatcccacacgttcaaaaatatgttaaataccgtttatcaaattattttaaagagaatctcacagggcaccatatcgtcttaaaagttcaccaagttttagcaagcaactgctcaggaccacttctacggcttaaaattttagagcagggaagggaatgtacatctcaaaattcatatggtgagaatacaagccaagaggatttcatccaaacactgtgattctcatatcaggagctccttgttgtgcaaactcagttttccatttttatcaaagcctcataaaaagtggtagttcccaggaacaaatgactgctcaccccgggaacttttcactctgctaatgactccaggagctggactcttcctctgtagagacttgtcctcttgcaccatccctgagttaatggttcagatggggtgggggtctaggtagcctggcagaggtgcgtgagaatgagacctttgctgagcccactggtcaggtgagaacactggcccttaaatgatgcatgcttagacactctgtcatgtccgactgtttgcaatccctaggactgtagcccaccaggctcctctgtccttgggattcttcaggcaaaaatagttgagtgggttgccatttccctctctcttccactaaagccatgttctgatggggccagctcccctccactctccctcctttgcaatcactcactgtgttataaagctcttccagcctcgggatggtgagaaagtgttgcatgttgactccattttcaatcaggagcttcacaaagtccacacgatctaagaccagtgcgtccagcatggcctgctccagagcgttcacctgcatgaggccaggagaggggcgtgagtacctggcgggtgctgggaaggagcgagttcacagggcagctgaggaggcagcgagaactggaccttcccctcgaggagggagactggctccgaggggtccctgtgagcccaggaaagggaccagagccatcccacctacccagttcagcagctcaagcttccgagggtcagtttcttcctctacttcctccttcaccttccctttcttcttgccttttccttttcctcttccccccttggtggtcgccgtaggtggcttcttctccttctctgtggccttgctatccgttgggggcgccaggcttcccaggggctgcagttcaagcaggcagggttgggaaagggattaaagcttctccttatcccaggaccagtgcctcccctctgcatgcacatgtgtgcacacacacacacacacacacgtccaggtacacaggagcacacacatgcttgcacacagatacacaggcacacacacacaggtgcaaggatgagcacacagactcagacatgcacacaggcaacacaggtacacataacctgtgagcacacacacacacacacacacacacacacacacacacttagctgtcacaggccaggttgtctggtggcaaagaccctgatctcgcgaccctctattacttatagcttgaagtacattcatgtactttaagtggctgtttcagttgatgtgtgcttttgtccagaggaaagggtgctgagaggaaaattcaaagacaccaaaaagaagtgtctgtggaaagtgatggaaacaagagaaaacaactgtgaggggccggagatgacaggtgaaaccacagatgcttgtgtggagagaagtctgggctgaggtctcctgggtgtaactgacaggcacatgtttccagagaaacaagggcctttgaaagatactataagaaagggaattccgctcaatggacagtaataaagaatagatagtcttgatgatgtaaggactatgctaagaagaaaagagagaatcaattagaaatgcaagggaggggcttcccaggtggctctgtggtaaagaatctgcctgccaatgtaggagatacaggtttgatccctcatccaggaagatcccacatgccccaactgctgagcctgggctcacagcccgtcctccacaacaagagaaaccagtgtagtgagaagcctgtgcaccacaactagagagtagcccccacatgctgcaactagagaaagtccacgtgcagcaatgaagacccaacacactcaacaacacataaataaacttattcttaaaaaaaagaaatgcaagggaaagcaaacatctatctattcaaataaggcaaggtccaaatatgaaggaaactcaaaggtcgcataatttaaacaatggatggactgtaagaaccttcatgctgttgtgttttcctttgtatggccctggtgactcacccagggctacctttctttctctttgagttcagctgcaatgttaggctcagctgtgaacaatctgtacagaatcacagtaaaatctgctggtttttccatttttagaattaacataaagacctagtatggaggatggaggagggcaaaatgaatgaagattgtcaaaaggtacaaactcccagttataaaataaatgccatggaatgtcatgtacaacatggtgactacagttgataattctgtgttgtatatttgaaagttgctaagacagtagatcttaagagttctcatcacaagaaaaaaaattgtaactgtgtttggtgacagatggtaattagacacattgtaatgatttcataatatatacaaatattgaatcgttatattgtatacctgaaactaatatgtcatatgtcaattatatctcaattaaaaacaaaatataaacaaggacctaatatatagcacattgtacaggagacagggatcaagaccatccccatggaaaagaaatgcaaaaaagcaaaatggctgtctggggaggccttacaaatagctgtgaaaaaagagaagtgaaaagcaaaggagaaaaggaaagatataagcatctgaatgcagagttccagagactagcaagaagagataagaaagccttcctcagcgatcagtgcaaagaaatagaggaaaacaacagaatgggaaagactagagatctcttcaagaaaattagagataccaagggaacatttcatgcaaagatgggctcgataaaggacagaaatggtatggacctaacagaagcagaagatattaagaagaggtggcaagaatacacagaagaactgtacaaaaaagatcttcacgacccagataatcatgatgatgtgatcactaatctagagccagacatcctggaatgtgaagtcaagtgggccttagaaagcatcactacgaacaaagctagtggaggtgatggcattccagtggagctatttcaaatcctgaaagatgatgctgtgaaagtgttgcgctcaatatgccagcacatttggaaaactcagcagtggccacaggactggaaaaggacagttttcattccaatcccaaagaaaggcaatgccaaagaatgctcaaactactgtacaattgcactcatctcacatgctagaaagtaatgctcaaaattctccaagccaggcttcagcaatacgtgaaccgtgaactccctgatgttcaagctggttttagaaaagggagaggaaccagagatcaaattgccaacatctgctggatcatggaacaagcaagagagtcccagaaaaacatctatttctgccttattgactatgccaaagcctttgactgtgtggatcacaataaactgtggaaaattctgaaagagatgggaatagcagaccacctgacctgcctcttgagaaatctgtatgcaggtcaggaagcaacaattagaactggacatggaacggcagactggttccaaataggtaaaggagtacgtcaaggttgtatattgtcaccctgcttatttaacttatatgcagagtacatcatgagaaatgctggactggaagaaacacaagctggaatcaagattgccaggagaaatatcaataacctcagatatgcagatgacaccacccttatggcagaaagtgaagaggaactaaaacgcctcttgatgaaagtgaaagaggagagtgaaaaagttggcttgaagctcaacattcagaaaacaaagatcatggcatctggtcccatcacttcatgggaaatagatggggaaacagtagaaacagtgtcagacttcaattttttgggctccaaaaccactgcagatggtgactgcagccatgaaattaagagacgcttactccttggaagaaaagttatgaccaacctagataatatattcaaaagcagaaacattactttgccgactaaggtccgtctagtcaaggctatggtttttcctgtggtcgtgtatggatgtgagagttggactgtgaagaaggctgagcgccgaagaattgatgcttttgaactgtggtgttgaagaagactcttgagggtcccttggactgcaaggagatccaaccagtccattatgaaggagatcaaccctgggatttctttggaaggaatgatgctaaagctgaagctcccgtactttggacacctcatgcaaagagttgactcattggaaaagactctgatgctgggagagattgggggcaggaggagaaggggacgacagaggatgagatggctggatggcatcacggactcgatgggcgtgagtctgagtgaactcgaggagatggtgatggacagggaggcctggtgtgctgcgattcatggggtcgcaaagagtcggacatgactgagtgactgaactgaactgaatatatagcacagggaactatattcagtgtcttgtaatatgcattaaatcttccctggtggctcagccgtaaagaacctgcctgccaatgcaggagatataggttcaattgctggggcgggaaaattccctggagaaggaaatggcaacccactctagtattcttgcctgggaaatctcacggacagaggagcctgatgggctatggcccatggggtcacatatagttggacattactgagcgactaaacagcaacaaataagtattaatggaaacgaatctgaagaagaataaatacagatctatacaaatgtacaactgaatcactttgctgtacacatgaaactaatacaacattgtaaatcaaccatacttcaatttaaaaaataaagaaaaaaatgttatgtcttaaatgagaatttcattaggagtttgtttgaatattgtcccttcttcattgagaatataaaatatatttgatcataaataaatatataccataatgagatattactacttatcattaaagaagctaaaattttttaaaaacctgccaatgccaagaaaccctcttacattgctcatggaaatgtaaaatgctacagctcccttggaaagcagaacacaaggacaattgaggggctttcggaggtgggattgagggctccgattttcatggcgtgctctgatttgttatctgcttttcaaaccatatttatgcatttactgaataaaagaaagcaaagaacactaagcagcatgaaaatggaagtcagagagaatttaatgccaacataggaatgaaaaatgaaattataaaatattgacagtattgctgaatttttctaaggggaggtggtcacaagtgattgtttcctttgttttgcttgtctatattttccacactttctagaaacagcttattgattctgtaacaagaaagtgggtgcaggccattacttcaggctggcaccctgtgtgtgtgatgtgttccccaggtcaggccctttctgtaatcctgaaagcctggctctctcagtgtggctgactcagagctgtgtcttcagaaagctgcccttcaaaaagaaaaaccaaccaaggtctgggattcctctttctgaatagacagtctccagagctcatgatactgcccttcctgccagccctgtctcggagctcttagcttctctgcctcatcaccactcatggaccagttcactttgctctaaaatcctttaccaagagtagacaaaccaggagattcaaaacaaaattaaaatatgtaagttgtggtagtgttcttttaatttgtgtagttcaataaacaacacgcataaaccactccccaaacttgtatcttattcctttaatacacttctctgattccttacccctggaggaagaaatggcaacccactccagtattctggcctaaaaaattccatggacagaggagcctgatgggctacagtccatggggttgcagaaagttggacatgacttaagccactgagcacacatgcacacactgattgcttaaattcttcacactaattggataaaagataactgtgaaaatgagatgtactttgaaggtatgtcccaggcctgttttgagaaataaggtttttaaagtttgacatgaaccctctagatattccaaacccccttttgaagcagcagagccctaattctgcaaacaaaaattttccccaagtcccagtacacaaaatctatcaaagaagctgctttaaaaaaaaatttttttttaattgaagtatagttgatttacaatgttctgctaatttctgctgccgctgctgctaagtcacttcagttgtgtccaactctgtgcgatcccatagacggcggcccaccaggctcctctgtccctgggattctgctgtacagcaaagtgattcagttataaatatacacatatattacattttaaaaattcttttccattatgatttatcccaggagattgaatagaattccctgtgctgtacagtaggaccttgctgtttatccatcctagatgtaacagtttgcatctgctgatcccaaactcccagtccatccttccgctactcctctcccacttggtaaccacaagtggtaaagaagctgctttgattgaaggagcgggaggctgctgagagttgttcatcatgcctgctcatatctgcacacacacgcccccacattacacccatgtacaaccacacacacacacatacacagatcccacagacatacactgcatgcatggtaaaccacacaccacacatacatttcacaccctacacacacactgcacgtagatacacatatacaatacaccaaaccacatacaaacatactacacacaaaggtcaaacacacagtcccctagccctctggggtttcacagaacgtagtttaaaaatcaatgctttcaatgcaatcattgtatttcattttaataagcaatcttctttcttcttaaaagtgtaaaaacccatgttcaccagcaatgataaaatatttagtgctctttattcaagagcactggtttgaatctgaagttagtgccaggagctcttatttcttgctggttctttgaaatgacacagcaacatctcctaataatcctaacaactagacattgttggtgttagttgctcagtcgtgtccgactctgaaacaccatggaccgtagccttccaggctcctctgttcatgggattctccaggcaagaataactggagtgggttgctgtgccctcctccaggggatcttcctgatccagggatcaaatcacatcttgtgcatcgcaggcagattctttaccatctgagccaccagggaagcaactagacactgggtcatcagaaaccccagaagattttctgagatccacagcacaagggagcttgtactaatacacccttgtacaaagtcatgacaaacagtatagattgaaaacacttagtttcaccggccagcggggcccaaagacaaagatctgactccgagctatgtccacacggttccaagccagcgccaagctcagctggtccggagccgacgcatttgttcctggaaggcaagagacggggcagttctcacgtcatgcccggactgtggcgggctgtggggggaaggggctgggtggggagcatgggcttccacaggctggctcggcatctcaccctcttctctggcccctgagtgactcagtattttcgaagagctggctgggaggaggatggaggcaacctctttccatgtcaggaaagaggtttctgtccctggggggaacagaggaggaagccagtgaccccagtttcctattctgcaagagggcaggagccctggggccacccagacccctgccaggctccttcagatcaaaggggaccacagtccagggtaccagcccctattgcagggagaccagctcagtaccaccaggaggctggcccaatggggacccctgcccctctctcctccagcaccttccctttcgcagtggaggagggaggtgactcctcaaccagccaagtggcagcctatcgttaggagaatctgggaaaattgacggagcgcagtgagacgtagggatcacaaatgaaaaatcatttcatgcttaccctctctgagctgaaacctgtcatgagctagctgtcaatggaaactgattcttagccatcaagaaccagtgatccattgctccctcctcccagaaaagtccccctccagagaacccacttggagcttcatcacgttaccacggctttagactacaataactctaggcaacctggccagctcagggttccatccccagcaaacacatttctggcaggaggaagttgcagggggagggtttcccggccaagagtggggcctggagaggccagcacggaaaggacaggaggggccatttctgagagctcacctttcagcagggcagttaaaatcgccatctcgatgtcttgctgaccctcagaacccatcctaaacacagtgatctgaaaatagattaattgtgaaaagactgagtaaagcaaagtggaaactgagagagagaattagagtgttgtttaaaaaaaggacctcagaggccaatgttaatacaaccatccctagagcaaggggattttccatcagggccttctgatttcctgaagggacagcattttgtatcctcaccgggaccttattttattcttcaccccacctggagctgagggagcccatgcaggacattcatgctaatatctaaatggctactaaaagtgacaaaggcatctctactcagatttgttacatttgtaggcaattcgtagatttagaattttgaagagtgcctgtgtaacaagagtgcgtcttccttataattaaggaggtaaaagtcttccctggtggcttagacggtaaagaatctgcctgcaaagtgggagacccaggttctatacctggggtgggaagatcccctagagaagggaatggcaacccattgcagtattcttgcctggagaatcctacggacacaggagcctggagggctacagtccaggggtcgcaaagagtcagacacaactgagtgactaacactttcattttccccttgaaggaggcaaagggtagaaaataatgagggtatttggtagaattttctaagcacacctgaaagcatggtgtgtgtcactcctcagtgctttatttatttaatttttaaaaaaactttttggctgcactacacagcatgttgggtcttagttccctgactagagatcgaatccaaccaagccccctgcagtggaagcataaagtcttaagcataggggccacaagggaagtccctgtgactccaacgctttaaatctcattgatgacatcagcctcagaactggtgggatgtgccctgacacacacaagatcctatgcacctgtatccctactctgaggagaacctgcctgtgctttacctgcttccctcacatggacagaattgccagctgggtcaggatctgtaaactgcctcttgaaaaagcctgaatggaaataggaacaacttcatcctgcacacataggcagcatcagaaaggaaacaattctctctgtggagctgcctagaggatccactcaagacacttaccagttctttcttcttcatgcactccatgatcattgcaaacagctgatgtgattgtgtcttgttgtaattaaatgttttttggatggtgactataagctgatccctgagggagtcattgattaacctgtttgaaggagatgggagaaagaagaaaacacaggtgaaatccatatgaataaatctatatgagtcaggggcccccagcttccaagatctaataatgcctgatgatctaaggtggagctgatgtaataataaagggcacaatcaacgtgatgtgcttgaatcatctcaaaaccatccctctgtcccctgtccgtggaaaactgtcttccacaaaactggtctcaggtgctaaaaaggttgaggactgctgaatgtgatactgtctggtatctttgttttgaaaattaaccactggaggatattccaggataccaggataggagaccaaaagggaccacagtcaacagctgcatttacacttgtcctaaatttcaggctatgtgagtacttagtcgctaagttgtgtctgactctctgtgaccccatggactctagcccaccaggctcctctgtccatgggatttcccaagcaagaataccagagtgggttgccttttcctattccaggggatcttcctgacccagaaattgaacctgagtctcctgcattggcaggcagattctttaccactgagccagctgggaagctccaaatttcaggctactaggttgaaaaccttagaagggaaaatgaagttgagagagaatgtataccctccccctgcccaagaaagaatccataagaaacattgcttctgagagcaccctcacttactgaccctgggaagtgggagagtagagctagaaaaacttccttctcttatatttttgggctggctagccataccacgactccttctgggcctcacaagaggcaattcaaaccccatccttcctaacatgtcagagctcctaccctccttcctccgagtacttgtgggcaaaggacaggatgtctgaggcccggccgctgccatcgcagaccaccacggggaccggcggctcttctcggagatattccaggacgatggaaaccacgttcgggcccccttccaccacaaggcccacgaggggcacgccctgccccagccctgcaacacataccacatccaagttcagaccactgtcaaggccccatctgaccccttgctctgactcctgaaacatggggaagaaggaaacccttaggcctggacgtgcgcttacagagggttagttttcactgggagagttgaaggccctcaggatgtgatggctgctcacgttcttttattcaaagcccacatcatagccttgttggaaaaaacagagccttaaaatgacgaacttgacaatacatatgtggttcagctgtatgttttcactcacatggcttacaagctgcttcaaggtgagatgcgagaacatggaagattcttcttgctaaaagaatacttccctgctgccctgtcctgggtgatgttcccactctggatggctgtcccttcaagaatgacactgcagatggtgtctagaccagtgctaggagagctccattctataataccagcctcacgtgaattagccttatgacatggggccagtcaccaggccaccctgaactgcagcagaccatcagtaagaggtgaatcaccccaaggcctcctctgcctcctgaaggagcaatggatgtaaagtataagaatctgtgaggctgtcaagtcaaggtgttctgtcaacctcaagtggtgctatgaatgtgcagtgttgttatagtaggtatagtagctgttgattagcctccagtgcctggaataggcagtgagttatctaggagggcaaagccatggaccatcattagctcgccagttaataactggttcccataaagaatcatatatatgtgtgtgtgtgtgtgtgtgtgtatatgtacacacagttgtacagcagaaattaacgcaacattgtgaatcagctatatttcaataaaaatatactgattaaaattgtgtttccacaaacatcatatatatatgtggaatctagaaaattggtacagatgatcttatttgcaaagcagaaatagagacacagatgtagagaaaaaccaagaggtgggggagtaggatgaattgacagattggggttgacatatatatacaactaggtgtaaaataagtaactaacaagaacctattgtacagcacaggggactctactcagtgctctgtggtgatctgaatgggaaggaaatccaaaaaaaagaggggatacatgtatacatatagctgattcactgtgctgtacagaagaaactaacacaaccttgtaaagcaacttcactctcatagaaattaattttaaaaaataataacttcccccagagtcctccctctgcctctatgagatgacaggactcttctgaacatggtaggacaagccgactctggtggcagaaccagaaggtgggctctgggaagcaggtggtaacaggcgtgcctcaagaacccaggattctgggtgggaagggagatagtgggagtgaaggggcagcagagacccattttcctacttcacaattttaccctcaaactggccaggacagactatgttctgagcatgtttccccagtgtctgtttgttgtgatgggagttatctgatctcggtaaataaggtagtgaatagaagacatgtccttggtttcacagttctgaaggactttggataagaactgccagcacagttgggagaaagtctaagaacttcaagcagggaaattgagagtttctggtttgcttccacaatgcatttctatagtcagtaactcttaaatattttgaacattttttttttttgtctgcacttcaagacatacaggatcctatttccctgaccagggctagaacccatgtctcctgcagtggaggcatggagtcctaaccgctggactgacatggaagtcccattgtgaacagctttgcagtctcctaccagagtaatctcagttatattcatttcagaagctatgtgttgagggtctggtatgtaccaggcaggctctttagccaagagatgctggagaaatggaccaaccaagagatgctggagaaatgaatcaaccaagagatgctgaagaaatggaccaagactatgcggacttgcccttgagattttcaacctctgcaaggcttgacatttgagatcttcaggacttcagggacccaatcaccttcttttctagaaacagaggagagctggttcttcatggttcaggctggactattgaagctccgtgctgtgggaggtgacgactgagcacccctttgctgtccctgccccactcagaaccctgggcaaaggatgacaaagggaagcccacaggtcacacggccaggggaggctgggcggtgtgaacatgcacgtggccagaacagcaaaaatgtgagagccatcagccaggcagctgcttcttggaaatccacagcttttcatagcatgctgtctcattccaactacactgcagccctacagaccctttaattatgatttacaatgaccatttcccaggtctagaatgtcttttgcaatcttaccaataatggttacaacaaaataccctttaagatcatttgaccattgtttgacattaagaatcactggagtctgaacagtcactttgctgtacagaagaaattagcttagcattgtaaatcaaatatactccaataaaaattattttaaagtaactacagtcattacaagaaatgagaaccactgtcaacatggtggggaatgccatcaccatgacaacagctgcagggctgtttcttgggtctgcactccttgtgaacttggggaaaagcatcctagtgcagctcaaggagtgggatttggtcagtggccaagggaaagggtcttgccatggtcgaataggagtcgggggaaggctgtaaatgtctgcgggcagtctcttctccagcctgttttgtaggacagccccaacccatggaacaacttactcgtgttgatcttctgcaaagaaatgtgcttctctagctgccgtctcagcatcacctcggccccgtacttgcccagggtgccattgtcagccaggatgaagtgcgtgtgagagttgttgagcacggagagcttactcagggggttggacatggtctggtacacccgtgtcacctgatgaaatgcacagcacagttcagagctgcagaacttcgacagtaacactaccaggagaagcaaaaacactcagatgtggagctatggcttcatctaattgtgcacttcaacctgctctgccttccctagcctctctattgaaagtttttttgtttgtttgtttgtttctaatttttatattaaattagaaaaaatacttccatcatgacaacccagtatcttaattttgcaattaaaaatttttttttcatattttggccaaacctcatgggatgtgggatcttagttccctgaccagggattgaacccacatctcctgcaatggaagcatggagtgttaaccactgaagcaacagggaagtcccgacatcccaacattttagatcatgcccttcttcaggggatcttccctacccagggatagaaccttcatctcctgcactggcaggcaggttctttactgctgaggcactggggggtggggggtcagtatcctgcttgaagtcttgtatcatcgttttgcaagatgttactgctaaggaaaggggaaaggctacattagacctctctttattatttcctacaactacaggtgaaatctacaatgacatcaaaataaaggcttcagtttttaaaaattgcatacctctggggagaaaatacttacatcccttcctaccaggtcttccttgttctccacaatgccccagggagcaattcctatagcacagacccggcctctggacttggaggagtggtccttcaaggcatcccccacgtggctgatgacacctgtgagcagccgtaagtcatatttgcaggccctttacctcccatcaaatcacttttcaggaactttagggatccctgctctgagctgctccacttcctgcagaacagggttgaatcactgaaagtctgagctcataaaaactagtcatcctgcattagctcctaggaaagggaaaataaaaaccaaagcaactgtacaggaattttctttacaagtttccaagacctaaggatggatgaagcaagggtctccctttgtctgcattcagctaaagctgagtcagatggccaggtgtgtttctcaacctctctgggcctgtgatgggaaaagaattgtcagaagcctcagtgaaaatgaggttttgtccagagctcatgtcaaagaatagcatatagtaggtgccagagatgttgaccattatcatgatcataccaaaataaataccaagataccacataaaagtttcacttctgccataaatattattgttaccatccagggttcttggccttcccccatcaatagagatcaactagaggccagacaatattctggcaagactttattggggtccctgctgccgcaggaggggtagtgagaacaaacaacaggtgcccttgcttgctcccccaggtggggtgagctggttccttacatgcagtgaggatcaggagtgtgtccaggggtgagtctggaggggtggcttaggtgttttgcccacctattaggtggtgctgtgtgcagggggcatgcacaataccctgtttttgctcctgatcccctgcttttgctccaggctcttcagaagtggcagttatttttttgttttcagtctctttgtaactttgggtccagaatttgtcccaactgtgcatacacatagattcttttagtcccataaaaataactttatgagactctgtctttagttactttgattttgtatctcaaggagaggtgtgtccaggtgccagcgctacagtgaagggtctcaggacccagcctgtctcaatctcaagatgtagcatgttttgtttcttgatcttaattatcccaaagcttctagggaaccacagtgatctcagggtctgcacattcacagccagggagagggctgacacttacccgtgctgacgcccccggtgaagatccaggccccagtggtcatggaagccttgatcaggcctttcccgaagacctgcttcagcttgggctgcatctcaaaattctgaaggcccccatgcacggatattaagagcttggggagctccagctgccagtctctcaccatgagatgaagcagcgagtctggcttggtgtcgtaggagacccggatatactgcaaaagagggtgtggccctcagcaccctttcttgggtctgactctcgtgtcactgtcactccggttcaagtgacagcttcctgcctttctctctggcagggatctggggccctctgtgcaagtccgtggccacacgatgggaaggaacactggaaggttgccagattcggcaagtaaaaatatagaatgcatagccaaacttgaattttacatgaacaatggaacatgttttagtataagtatgcttcctgcaatatttggggcatccttaaaaattacatgttatctatctgaaattcaatgtaattgggggtattgtattttacctggcagactttatcttttattttttcattgccttgtgttgtgtgagtgttagtcgtgtcagactctttgtgaccccctagactgtagcccaccaggctcctccgtccacggcattctccaggcaagaatactggagtgggttgcatttttcattgccttaggatgatttattttgtcaaagttctcagccaattttcctagtatcagaacttctataatgacaataattaatactgagagtaaaaggaatcctgaaattgtccaatactgaaagatattactattagcaaagatttatttttaattatttaactagcttgttaaaaattatgtgcattgcaaataggttcatctgtaccatttttctagattccacatatatgcattaatatgtgacattcgtttttctgtttctgacttatagcagaaaataacacaatattgtaaagcaactataaaatatttttaaagtaaataatccccccaaaattaagtactgtcacacacatgcacaaatgtttgcaaattaacaaatttgtcagaaattctgtagaaacaaatttgtagaaaatgaaaccaaagttcaaaggaaacacactctaaaatttcaaagcaaagaccatttatagttctaaacgacaattgaaatacttcttcactgtgtctagcattcataggagcacagaaattcctccagattgattttatttctggatactttttgttcattggaaacttctaggaaatatgcctgttcggtttacaaaaattttagagcaacttaggaatttatctactttatgtaaagctttttaacaattggtcattgttgggctatattccatgtgctcaggatcagttgctaaattgcattgttcaagctagggattcctccaagcccgtggaagaaagtgaaatccagtctaattcagtgatagtcaactcaatccccctccccttccacctcacccaaatcccaaatctcagtcttcctggaccatctctcttttactattgaatcaaaaacatttataacaggtcaaagctgactgcggtaaagctctgtgcatgcttatgtgctcagtcgctcagtcgtgtccaactctttgcgaccccatggactgtagcccaccaggctcctctgtccatgggatttcctaggcaagaatattggagtgggttgtcatttccttcttcaagcggtcttcccaacccaggaatcgaactcgagtctcctgcattgcaggcagatcctttaccgctgagtcaccagggaagcccatagaacccaaggtgtgggggagggataaattgggaaattccggttgacatttacacacagtactatacatacaatagaagactaataaggacctcctgtataacacagggaacttgctcatggtctgtatgggaaaagactataaaagattggatatacatatatgtatagctgattcactttgctgtacaccagaaactaacacaacattgaaaatcgactgtagtccaataaaaaaattttttaaaaaggtcccaagctggctcagctggaatgtgtctccagatactggacaggatgtcttagagggaatgggtgctggaaatggggcttgtaactgatctcggggctggacctttcccttaaggtgaagaagaggttaatgagtccatgcactggccctgtgaaacgcctctttgtgtcctggccagtaggcagggcaaccttctggaagacccagtgctatggtatttgcttggaatacttctgaattttatctgaacaatgatgttgggccagtgaaatagaataaaatagcataaatggcctgacagggaccgtgggagtattatttagaatgggctgaaagggatcccagtgctgccgcctcccttctctggcagggctcctcagaaaggcagagggcactccctgtttacatgcaaatgtgaaaggccgccgtcttcttgtcttctcggaccagctgaatgcccgccaagggaggctgggcttggacttcagagagaaatatttccaggcgctcctcacccatttaagggtggctcagtgcctacagttatttaatagaaaagacaaaacaaagccccaaacaaccctaaaaaccaaatgacataattcgtctcttatccctggagatggaacagtatctttgtagagtccggctggactgtgattcttagtatagattttactgtttccctggtggctcagtgaaaagaacccgcctggcagtgcaggagatgcatgttcgatccctggttcagaaagatgccctggagaaggaaatgacactccagtattcttgggacttccctggtggctcagacaataaagaatctgtctgcagtacaggaaacctgggttcagtccctggaggaggaaatgacaaccccctccagtattcttgcctggcaaattccatggaaagaggagcctggagggctacagtccagggaattgcaaagagtcaaacacaactgagcacagcacagcatgtgctctttatcatagtgcccagtttccaaatctcatggctaaaagtggagcgtgcagatatatttcttgtctttacaatgaaaactctaggaagattgcatcacacccttgaaagaatacccaggtgtctacggtctcagagtctgggaggctgggcctctgatggaggctgtggcttagtgacaccccttcccaagcctctcttaccatggctttgttggagtatccgccgccctgaaattcgagaatcccataggaatctgtggggtacttctgggtgtgtttgccaacagaccatttttcaggttgaacttctgccagcttgttttcctctccatttttgctggctgttacacttggcagaggggggatgtgttggttggtgagctggccacaacaacacctgaaaacaaagacaaagcttggtctttctagaacattctccttcttacgctgcattaacctgaatagaagcagactaacaccttcctcatccagttttactggggacagaaataccccttatggtgtccttttccagataatcagtgcatatctatttccacgccagactattttaaacacaatggatgactgcccttccttactgaacacatcttaattctctctttttttttaaggattgttgtatttattttaaaatttttattaaaatatttatttatttatttatttttggctgtattgggtcttcgttgttgcatccgggctttctctagttgcagtgagcggggagtactctatagctaagctgaggacttctcattgcagtgagcttctcttgttgtagagcatgggctccagagcacaggctcagtagttgcagcacagggatttagttgtcccacagatgtgagatcttcccagaccagggattgaacctgtgtcccctgcagttggcaggcagattcttaaccactggactaccagggaagtcctttaattctttttggtgttttgacaacatgattatggccaccaatcactgaaattctgtgacaaaggacactcactctccatccaccccccatagagagttgaccctcaaggatttttcaatattgctaaattcttccattgctttagtacaacatttctctacacaagttaacattgaaagtgtatttgttttgctgctcatacttttggtgtcaattcaaagaatcatttgccaaatccaaggtcatgaagattaacttctacgtttttggctaagaactttatagttttagcccttatatctgatatgtgatagatttggagttaatttttatatgtggtgtgaggtaggggcttaaagccattcctttgtaccttgatgtccagttgtttcagcgtcatttgatgaagagactaatcttcccccatcaggttaggtaaccttgccaaaaaatcatagacaagtcatagacaagtgagtttctttctggactctcagttctgttacattggtctttatgtctacccttattccagtactacactaccttgattagtgtagaactgtagaaagttttgaaatcaggtaacatgagcccttctactttgttcttttttataagattgttttggctattttggatcccttgtaattccatgctaatcagcttgtcaatttctataaagaagttacccagaactctgatagggattacattgaatctgtaggtcattttggctgtctgcatcctgacagaggagtttatagcccaggtgactctctgcttaatgattcacatggagaataagttctgggcatccttgactcctcctccctttccctcaaacaccagaatagctgctggcagctggtggacaagggctattttgaataacatcttaattatggcttccaatttacctgtttgggtctttagtgctgggaatgacaaagatacattctcgtttgcaaaaggttttttctatccaagctttctgtccctagaagaagaaaaaagtggacattagactgagatattaccaaaccaacctcagaattcattattttacttttataaaatgaatagtaacagggagtctgcccaaaacatttgaataaacacctccaagaatggtgaatgcaagcctttcaggatcttagctctggtttcttttaagagaaatggctcagaaatatgcttttgtggtttccgtagggctaggaaacctgtgctttgcatgaaaatcagagtctacagatggggaatgttggtgcccctagagccagccagtgccctgcggagcctggtgtggacatgagttattggaaaagctgacaaaattgtcagtctctgatcaggtctttgttttgttttgtttttccttaagatgtgtgtgtgtgtggaccatttttaaagtctttattgaatttgctataatattgtttccattcatgttttggttttttggccacaaggcatgtgggatcttagcccctggaccagagatggaacccatgtctcttgcattgggaggcaagtcttaaccactggaccaacagggaagtcattctgatcaggtcttcgatttgctgacaagaacctggtcttctctagactcccaggccccattgcactatagtcattttataagtaatgtttctaactggtgctcagattcaccaactgctatttttataattaaaaatattgaagattgtgaagaactggggcctcatgtaacattgatgctggggctggaaattggtccatttaccatcaggggtaatttggcaatcatttgttgcaattacaaagcttatatgttttcacttgtcattttttaggattttattctacaaatatgcctgaacaagctgacacaggcccaaggctatttactgcatcactgtctgtgatgtcaaaaggctaggagtcacctactgcttatcagtaggggattgttacccaaatcatggaatagtcatcgatgcaattctttgacaaaacaaaaacattttttgaaagagaataggatgttcttgttctatcgataggggaaaatcattgagctatggtaagtgaaaaagcaagccacaggataatttctagaaaatagacaccatgtatgggaatgataccccaggagcagctggcagtgggtccctcagagggagacctagaggcctcagggacctgggtggaaaggaggtgcccatagcctggggccctgcttagtttttttaaagatttgtcaagcttagtgaagtaagccataaagaaagacaaatatcgtatgatattgcttttatgtggaatctaaaaatgtgatacaaacaaacttatttacaagacagaaatggactcacagacacagaaaacaaatttatggttaccaaaggggaaaggttgggggggagggataaattaggaacttgggattatcagatgcacaccactatatataaaacagataaatgataaggacctactgtatagcacacggaactatactcaatatcttgtaataatctataaaggaaaagaatatgtgggaattccctggtggtccagtggttaggactcagtgctgtcactgtgggacctgggttcaattcctggtcggggactaagatcccacacactgcacaatgtggccaaagatacatagatatagatacagatatagatacagataactgaatcattctgctgtacacctgaaactaacataacattttaaatcaactacacttcaatttttaaaattttttaaattaagactttctttttttagagccattttaggtttaaaacaaaactgaaagggtggtacagagatttcccattaactccctgccctccatccttatcaatgttctcctccagggaagtgtattttttaccaaagtcgaacctacattgacaaatcattaccacccgaagttgatagtgtgtgttatttcactcttggcattgtacagtctatggtttaacaaattaaaatgacttctatccaccattatagtatcatacacagtgttttctacccccaaaatcttctgtgctccgcctattcatccctctctcctcgtaatctctggaaatcactgaatttttactatctccatagttgtgccttttctaggatgttgtatagttggaatcatccactctaaagtccttttaggctggcttctttcacttgcaagcatgctaagtcacttcagttgtgtctgactctgtgtgatgctatggactatggcccttcaagctcctgtatccacgggattatccaggcaagaatactggaataggttgccatgcctcctccaggggatcttcctgacccaggaatcaaatctgtgtctcttatgtctcctggattggcaggcagtttctttaccaagcagtgtcacctggaagccctttctttcacttggttgtatgcctttaagcttctaccatgcctttctgacagataagtcttttttagtgctgaataatattccatggtctggatgtaccacagcttatttacccatctaccctctgaagttgtttgcatctaaattgtgtcagttccaaataaagatgccataaacatctgcgtgtggttttccatgtgggtgtttaagttttcctgtttaaaaatctgaatgatgtgaatgtatgaccttggtgtgtagccatccttcaagtgtgacatagaccctccagggcctgtgactaataaatattcctccagcttcccttggtcttcgctgaagtgtattttgcaatcagaataagaaccacaagggctagggcagccacattagtcctagaggggtgatgtctgtgtggctccctgcagtgaggcctgggtgaatgccctgggcatgcctagccaggagcttcattttccacaggctgagaccaacatggttacacaaagcacagagctcaggagacgggatcatcagctgaccacacatatacacgtatgtatatttatttcctggctccatctaccaaaagggcctaaaaacactctgacagaaataaatatacttagtgtgcaaatatttgtttctaaacaacattctccactaaaaaaagccagggctcctaggacaaatgactgaatccagatctggggcagagaaagtacaagaagagcctggaacatcttgtgccagaaagtaaggaagtgtttactttccacttgggaacttgtcagaaaatacagaaccctctttgaaagggctctcattggctttatctgagatacgagcatgaaactaaatgatcacaataaagaactgtaacactttggctgaaataaggatccatgaactcacagtggcagaaatttatacgtaaataaatatataggggagatgggaaagctctttcttgcatttcttagtcaccctcccgatacagggggcccgggttccacccctggtcagggaactagattccacatgccacaactaagacccagcacagccacataaataaatatttaaaaaataaagaaaaccaacatttggcaaccatcaagaatctttgttgaaatctacatgccacgggtaaaggattggagagtaacagtacacttacataatctcaaggcatctcccacagatatttttcagtcacaaaggggaaatgagtaacctgacaggttggagaaatctggtgaataccacctaaaataaagtgagctgtcaccagcatgaaaccaatattcaccatgagcctctagatgaaatgcagagaagaaaaattgcctaaaatgcaaaatctgaatctaacaaggaggaaactttagacaaccaaactgaggagcatcctggaaaataaccgaaatcactgagctttaaaactccaaaggccgtgaaaggcaagtaaaggctggggaacggtcacaggagctatagagacatgaccctggaacacccttcagttttttgcctcatctttggccctggcccccagtcccgcccaccctttctgactcccaccctctgatccctctccaggccccactccctgtaatggctcattgacccttcctcccagtgcctccaccccacccctgcataagaaacccttcgcagaaaactgttagtaaccaggtgtgggaaatcaggggagcttcccgggtggcacagtgataaagaatccacctgctaatgcagaagactcaggtacgatccctgggttgggaagatcccctggaggaggaaatggcaacccactccagtgttcttgcctgggaaatcccatggacagaggagactggtgggctacagtccatggggtcacaaagagacggatacaacttagtgacagggcacacatccatgtatgcatgtgggaaatcagaaatccagggtctagccccttaggaaactaggctcaggcccctgccatcacaagggggacaggccatctgccatgcagggtctcgaatgctgaggtgggtaaggaactgggccggcagtaacgtgcctcagacatagtcacatctattctgtcacaggcagtattcaaacgcccccaccacccagtgccccaggcacccttcctgctggtgcagggcatctgtgggcctccaggggcatcagcctggcatctgctcccccatctcaggagggggcttttcaaagcgcccagcactgactctgcttgtagccatgggcaagggcagcagctggtatccacacagctccaggctcaacccacttccctctgcttcaccaaaaatccattctttttctaatgaaaaagctagtatgtgattaccatactttccctgaggaaagaaaggctttgcactagtactaactctgaatttttcttattctttttttagtttagttaggaagaatcaattccaaaattccagttactgcttgttgttgttcagtcactcagttgtatttgactgtttaccaccccatggactactgcagcattccaggctcccctgtccttcactatctcctggagtttactgcaggcactcctgcaggagaccgagcaggactgtggctcctgtgatttttgtgggagattcatatccatcaagtctgtggtgctatgttactgcttagtctccagaaatgttctagaatcttctgaggatgaacaagaggtcccggaagtcactcactctatgcctgcagtcatgcttcacagggtctattttctgtcaagaggcccagcagggaggctctctggctccctgctccccagcccctccagcaagctattcctacacaccctccctctctcatctgacccttttcctcccacaagaatctcggaagcccccgccctgctcggtctcctgtagaagtgcctggtggaagggtggtgctcactgtcccctggtgactaaggggtgattcagaagcccaggtggagtgtggccagggatgagggcagcagcccacccctgggcccctgagggcagctgggcacacagagcagggagtcacccaggtcagctgacgtggggcgagctcagtctcagaggcaaattcaggtgagaggcgatgggtggagggccccttggtaaacagtcctcccagccctccagaggatgccccagggctgagtcaggccaagggattaaggaagggcatgtgggctgagatgaaaggaagcagagcctcctggggttcattcataaaccctccaagtccccccagcccctaggctaaatcccgctcactcatctgaagcagtctcttccatcacaaatatttatattattttatttttttaacagaaattgagaagcattttattttttttcagggaagaagtggttatttgaaatgccttggggcagggtgatgggacccctgtcccggggattaggctcccatctgaaagagtgcaggaagctgagtaggggatgtgggagcactgcccaccacactgagctgcaactttcctgtctctgaaagggacactgctttgcatagttctgagcttcaactgagatgatattagtgccatatttgggaagtgctacaggagatatggattcaatccctggttcaggaagatcccctggagaaggaaatggcaacctactacagtattcttgcctggagaattccatggacagaggagcctggtaggctacagtccatggggtcacaaaatagtcgcacgtgaccaagcaactacgcaggcacacacacacatttaaatggaaatcctggtcattccaacagctcccctcccttatctacagaggttacatgctaggaccccccagctgatgcccgaaacccagataggaccaaattcgggatatactatgccttctctcatacatacatacttatgataaagtttaatttatgaattaggcacaggaaaagattaacaataactaataatagaataataactaataataaaataacacaaatgaacagcaattcctaataatgaaagaaaaacccttgcctggtctggcctctagtcaatttctcttccttggggaagaaggttcagtagcaggcagatgggatatttggtggtgctgttggggctgggaaaggacctgatgttgatggggatggagggacgggaggggcctaatcacgaacctaggtttctggctggtggagctgggtggctggggctgcaatttatggaggtggggccacgcaggcccaggcttgaggaagacaatccagccccctgcagtgaacaccacaggctccaggtacccattgaacctgcagggagggaaaggggtcagctggttgcatgaatgagacccagggtatagcaatatctagataactctagataatgggaatcagagagattgctgatggagagactgcaggaagaagagaggaaggtgtctggcactgagtccccaggagcaggggagagggctggggacacaaggtctgggaggtagaggacagacacagtgtctcaggagcctgctgaggatcgtgtgtccttaatggactagccaggtttgtgggagggagctcagagtggagtgggctgatggccctgccagctcatttttttgttttattttcaaagaaaggaaaaaaaaaaaaatgtatctgctattaacaataaaaagccccaggtaacccttatacatcctggggagtaaccaccagatctcatgatcaggtcatttgctggccttttatgtggatttagagccaagtcctgaggagctgtagacagccagcctcacccccccacccccacccccgtccagaataggggtggcatcaggaccttctggaatgggttcatgtggatggggaggggcctctggggaggtgtgggtgggaggagcagggcagggcacagcctggagaaggcagggctgaagtgggggtgcccagggaaggtggggagggtggggctggggcgacggggcagcctggtctgggcctcaggaagtggcttcggaactaagagctggtttgcgctgggtgagtctctgtttactcagtggccctgcttcttgggccaaaattaacagcaaaggccacagtgaaatgatgatttgtggaccaatttagccaaaagaaaccgctggtctcatgtgtctatttagagcagacgtcttgcgctctcatccagggctgcatggggcccacacgtggacttggtttgacccttgtatcaggagaattcgctgctgttattaacggcaagagaggtccccgtgtgaaaaccttgacctctggctgccctgcactgctctggggatgtgggaactcgggctgacagacctcctgcatggctgaggctgtgagtaccccgacaggagagatgaggaaagtgctcttgaagaggggacagcaggacagggaagaatgccaggactcccttctctgctgtgatgggcacagtgatgcctgctcaaacctggatgcgtttggggtgggggccatgcagagaccatgggctcccttactgtgctttcacagatgaggagacagacagtggaggggttaggactttggtaggagctctgggaagtgatggttggatggcatcactgactcaatggacatgagtttgagcaaactctgagagacagtggtggacagagaagcctggcatgctgcagtttatgggtggcaaagagtttgacacgactgagtgactgaacaacaactgggaagttagggggcatcgagacataagacacagtgacatggtgaagccacaagcttggccagtctcattgccaggtggctgggctgactcccctgcatggctctgtccctcatctcatatctgtcttctctggcagattcaaaaaactttctccaaaatgggcagatgcttttgaggtcctccctttaaggaggatagagaatagaactatctctattttgaattaaaaaaaaaaaagttgtaataagatttttctggcacaatctagctgtgcaagaaccacccttgaggtgtaaatgtcgagttcaccatggcagccataggtagcttatggagcatcttaaatctgggtggtctgaattgggatatgctgtgaatttacatgtaaaacagcaagttatcatttgccatgtctaacactggaccttaggaagaaaagtggggacttccctgaaggtccagtgattaaaacttcaccttccaatgaagggatgtggatctgatttctgtttggggagctaagatcctatgtgctttgcagtactgtcaccccactcctcccaccccagaaaagaaagaaagaaagaaagaagagaaaaagtgtttgggaggatttttcccaggtggctcagtggtaaagaatctgctggccaatgcaggagatgcagcagaagtgggtttgattcccgagaaaatcccctggagaagggaaaggcaacccacttgagtattcctgcctagagaatcccatggacagaggagccttgtgtctgtggacacaacagtcagatacaactgagctattcggtgcgaacacattaaaaaactaatacgctctttatgttgaccacattttgaaatgatcatatcggggatatattgagttaaatacatttttatatttcactaacttttttaacatgactctactctacaatgtacaatgatgtctagggacagatctctctgcatactaatgcatccctggtgactgtctttttaatggaagtgtttaaatactgaatgccattaatctctaggtcagggactgggtctcattagtcctctggatgagggcttctattttcccagatctagaactttaacacacacacacacacacacacacaaacgtgcacatatgcacacaaaattatagaacatctttaaaacattttcaaacaaagcaagagagaattttctaagaatacctagtgctccaagtcaagaggactgtaagttaatagaaagtctgctttgttttcacttagttcagaatgaagaccaaccacttaaatgcctgcacatctttctgtgccttgtacttatcaactttgcaaaacaaataaatgaagtttcgaaggagccaaacccaacacaagccctgacttctgctgaaaaataactaataaaacataaaccatgacagcaaataccctcggcactggttaacatttccagttacattttctggggcctaaaatacaaggcagggaacgatcactttatgggacaagtatcactgcaaatgccatgaatcaaaactgctgcttgaagggcttccctgggggttcagtggtaaagaatcctcctgccaacacagaagacgtggatttgatccctgattcggaaagatcccacatgctgtggagcaacgaagcctgtgctgtagagcccagaagccacgattactgaagtctgtgtgccccagagtccatgctctgcaataagagaagcctgagcaccacaactagagagtagcccccactggccacaactagagtgatgcccacacagcaatgaagagctatcacagtcataaataaacaaatcaaattatatatatatatatatatatattttttttaatgttgctcaatagtttgcaaaatgtaatttggtgaacattcccaaagacaaccctttcccaaaatcagacctgtattactaaggtcctctcccagagaggccgattgtccctcttatttcctccataaatacttactttaggctcagcaaatctgtcttgtctttttcctcccaaactctctcccttcttttattcccgtctcctacccctggtcaactgagaacaaatcctgtgaatattttcaacattccccacattcccaccatttttgctaatatttgctaaagtttacaatttttctggtaacaaaaggaaaatgtatctcttattgaatattgttaaagtaaaagaaaaagaaatgtacaaccacaaaggaataaataaacatcacacaaactaactgcatttaaaataatggctagcatttcaacgtattccttggctctttcctatgaatagataagatgtgtgtgtgtgtgagtgtgtgcacgcgtgtgtaatgaaaactatgattatcctgctttgtcgttattcattcttctctgtcgtttaaaaagttaatacattacaaagacttccctggtagtccagtggttaagacttcactttccagtgctagagagaagagttttatccctggtcagggagctaaaatccttgatggctcaaggcccaaaacccaaaacatacaacagaagcggtattgtaacaaattaagtaaagattttaaaaatggtccacatcaaaaaaaaaaaagactacatttccccttgtagatagaccacgattatgtgtccagtcctctatttcagcgtttggattgtcccctgtgtcttactgtagtaaacagtgctctataaatgttggcttacatttatattaatccatcaggattatttccttaggacatatccttagttgtgcagttgttggacttgggcgtatgtgcgtgctaagttgtgtccaactctttgtgaccccatgaactgtagcctgccagtctcctctgtccatgggatttcccaggcaagaacactggagtgggtttccatgacctgttccagggggcatgcccttctccagggatcaaacccacatctcctggatctcctgcactggcaggtgaactgctttctagaagccagctcccgtttcccacccctcgccccctaggagtgagaaggaatctccatcttccttcacagccaatcaatctttccaccgaggttttaactaacagctaaaatgtcagctgataaagtcttacagggacatcccagccaagaggaagacgcacagatgcacattctgcaagaagcaggggaccaaggtaagatgctagggagtgaaggccaggaggccaagccctggagctggcgcttctcagcagaaccccagcatctgcatttagacaatggagcctggtggtggccggttccataggcttgtcccttcagggaacatggattcactggcccttaccacatgaccttgtctagccaggctccacaggagaggagctggaggccccaggaagctgagtcctacctccaacacgcccccacacctgagcttacctgccccagcacagggccaagagggtgcagctggcctctttccgcctcctcctctggccaggcaggaggctggccgaggagggcccaccctttaagaggaggcgtccacatgaggagcacgtgagcccccatactgagctctcatgatccccatgaggcttgtgacctcacttccaggcccaaaaaggaagccaaagcccagcccaccaggctgatcaatgttgatgccacgaaagcagccttggggtctggggaggcgggaggaggggagtgagaactttccctttgaagtgacccttcccccagcagcccttcccagctaaaaatgtcagcactgtttgaataattgaaacaattggacataactggctctttcagcaggctcttagcttgaaggcagtgccctaattaccctaatcctttcatatcatctgaggctgggccagaggtcgaggtggatgtgagtcccgtgtgactgtcagccttgtcttggtgcccctgagccccgggtccccactccgaccacagcccgagcgacctatgtccacactcaccccacaactatcctgatgagagcttctgaggtttgctgtaatgattagtccagtgatcaaggagatcaaacaggtcagtcttaaaggaaatcaaccctgaatattcattggaaagactgatgctgaagctccaatactttggccacctgatgggaagagctgactcactggaaaagaccctgatgggggaaagattgagggcaaaagaagggggcaggaaaggatgagatggttaaataacatcgccgattcaatggacatgaacgaggaaagaagaaacctgagccctgaaattctcccacccatggccttccactcaacgaatgcctccccagcagaggaggctacaattctcctcagcctgggttccctctgtcctccagaggaaccaacagagatgcaggcagactggaccccaggggcattaggggagtttccattttacagatgaggagactgcggatcatgtgagtcaagaggctgtttgcccagacattgtgagaggcgggcaggaccctgactggcccaggctatcaggtccaccctgtagagctcccgggactgcaggccaagcctgggaccaacccccaccaccagctgcaggaggacgtacctacacctgggggatgcccagaggcttggggagcctctgaagtttggaggtggatgcaggattgtgcagggggcctggggaggacaggtctatcctttgctttcagcagcttgtctcaggtctctgcccactaaagggcagagacatctttgacatctttgtcccagcaggggtgctggggttgggtaaagtatgattcctgccaagctttgcctatgtacacagcctggagtgagttggcagtgcccacactgaagtagctctggcctggcagcagggttatatgccctgtagaccacatccctgatgggctcacaggttttagcaggagtctttctgaggctgcaggtggctgtaggtctgactgcatggctcgagggaaaattatgggtgctgggtgcttctggggcatcaggaatcagactggagcaaccagggaggcctcccaccttccctgtggccgcctctatggccagccccaccatggctgcagaacatgaagcctggtggtcagtgccaaggaccaagcccatcctagccagccagtaagtggctctccagtcagtggacatgactgtcattagtcatttaggcccttctcaggatcagataagatggagataatgggatacccagacttctgcaagccaatgcccatcctccccggggccagcatgctgagcccagtcccctgggactgctacgtgcaacatggtggccccagccccatctgcctgctgactgagaacatgaaacatggcctgttcaatctgagatgaaatctatgtataaaacacatgaaatggccaagactggtgatcatattttttactgtttgcatgttaaaatgatattttggatgtttgcagttgaataaaacattattttaaaaatattattaatattttaatatattctattttaatattttaattttcaatataattaatcctaggaggaaaatatgagtaaattttatgtacagtttgattccaactgtaaaaatatacttagggaaaaaaggaccagaaaggaacatgatatgctaacaggttatgttaataaaaataaatgtgatttttatcacatatattaatttatataatatgcataaaataaaattcatcatgagttcgtactgataatttcccattcacatttagaaacagtgattttctttaaactccttgattttatatttatgtctctttttctttatgctctcttatcttcaggtcattgacacagtttctcttttgctttatcttaggtaaagtttcagagcaacagtattactgtgacccataaattactgaaagcagtttaaaatgttgttttatttttctttttggtctgaggtatatctcatcaagcacttcccaggtggctcaagtgctaaagaactcacctgccaatgtgggagacggaagagacatcagatctatgctgggtcaagaagatcccctggaggaaggcctggcaacccactccagtattttgcctagagaatctcatggacagaggaacctggctggctatagtctatggggtcgcaaacagttggacccaactgaagagacttagcatacacacacacatatcccatcagggttttcacatcacttaaaaatgattctgccttatatggctacttggcaaaaatgatacatagttggattcacttatggaattttcccctgggtttttagaaattggcttctcaatttaatataatcatataaaataggattgggggcaggaggagaaggggacgacagaggatgagatggctggatggcatcactgactcgatggacatgagtttgggtaaactccaggagttggtgatggacagggaggcctggcatgctgcgattcatagggtcgcaaagagtcagacaggactgagtactgaactgaactgaaaatgattacattattgcaaacttaaaactgcaaagaaggttttttcagaagtgtctggctactatatctatttcctcctaaagtttatttactttaaagtgtaaagtttaaaatatttttgtttaatctttctccttttaagtattggtatataatattaattctgtgtctatatagacacatgtatttttttcatggaactgatagaggactttatacactttgtcccaccttgctttttgtacttatcttctccactttggggaggcattacttagctgtgtctcatttctgttttgtagctgtgtatcctgaatccttgagtgaatgcatgaaaattcattcaaccagacagacacttgggtgagttttggtctttacaaatcactgagcagcaaaaagccttgccgtgtgtcctttgtattttgccagtcatctctaggttagtttcctagaagtgagattattggaattaagggtaaatgcacacataattttgctaacattgcaaagttttccttccatctgtgcgaccccatagatggcagcccaccaggctccactgtccctgggattctccaggcaagaacactggagtgggttgccattgccttctccgcaatagaggttgcaccatcttgcatttccaccaatattttatgagaattgtttccccgcagctttgtctatagaatgtgttgttaaacttttggatttttttgtccatcttattaagaaatgatgtcttaataagtatagttttcatttcttgcaatgctcttgtccagttttattgtttgtttgcttgttttttaatcaggataatcctggattcacagaatgacctgggaaatgtttcaccttttattttctataagagttggtgaaaggttagtattaattcttctttacatgtttgatcgaatttacaagtgaaaacatctgagcctggggttttctttgtgggaagttttaaagttaatagttcaagctctttgcttttcatagatgtactcagacttttctgtttcttctttagacagtctcaataatttgtatcttttcaggaatttgttcattacatctgggtttttagttgttatacactagaactacactggcatgtagttgcttatggttttcccttaaaattatcctttttatttccagaagatcagtggtggtatcctgtctttcactcttgattttactaacttgagtcttcttttttttttttttcttggttcgttaactaacttatcaatggtgtttatcttttcaagaaaacagcttttggtttcattgatttcttctattgttctcctattctctattatatttctttctactctagtcttatttccttccttctgcttgattcaggttgtttgctctttttttttttttttagtgttccaaggctgaagattagattattgacttgaggtctttcattattaatacaggtgtccagggagggatgaaaaagccctggggagtgccaagtctcaggccagcactggccatttgtaaatcctgacctagaggtctgtcccaaaggccttcttctgaaagtctcatttgatgcaggacttgtacctgctcaacagattatgctgctcctggaaatggctgcaggagtgagcatccactttcaatatttctgaattatttacatacattttaaaaccaggtagtgttgacttatggcctatgaccctattagcagaatctttgaaacaaagctgaaatgatagatttatcaaacaaatatattggctttgtaaattaaaattcacatgtcatcaaacaatgcctgtatacatgagcaaggtcagagtggacttgaaggcctttgatactgagatcaaggatagtcataaaaataaatggaaaacttgatcagacagagactgacaggtccatcaaaacctttgatcaccataaactctgactccatagctctggaaatcctccaccgactgacagaacaaggaaggtttttctactttggggaaagaagatcctcaaacatctgggacacaggcctgggaagctcacccctctccgtctgaaaagcagagggtccttctggtgaatctggggccacatagaccaaaatgcataggtcattctccaaagggtgcttctcggatcaatagttgaatatcggcagcagccttttcacattcactccccctctccacatggctctagactggtgaagacagagctctgatcattcttcagtggaggacacaggccaagagagtccaaatggacaacagcttcctatctaatcctgggcgctttctcttcatttttcctttttctcttctctttatttattttggcttctcaatgggttatgttgcaatgctggcagatgatatgtcctggaatcacaagcacatgggcaaaaaaaaaaacaaccaaccaaacattgactatattttagtttccagaataatctctgcagtaaaaagaaagctggtgattttattgtggaaatgaccaactgcctcagagctttgtagaagcctcacacttgtgtggttgttgttgttgttcagttgctaagttctgtccaactcttttcaaccccatgaactgcagcacgccaggcttacctgtccttcactatctcctggagtttgctcaaattcatgtccattgagttggtgacgttatcaatccatctcatcctcatcagcccccttctccttttgccttcaatattttccagtgagtcagctcttcgcatcaggtggccaaagtattggagcttcaacttcatcatcaatccttccaatgactattcagggttgatttcctttaggattgactagtttgatctccttgcactccaacgggccctcaagagtcttctccagcaccacaatttgaaagcatcaacttttttttaaattttaattggaggctaattacaatattgtagttgttttgtcatacattgacatgaatcagccatgggtgtacatgtgttccccatcttgaacccccctcccatctccctccctatcccatccctcagggtcatcccagtacaccagccctgagcaccctgtctcatgcatcgaacctgaaatgacgatctatttcacatatggtaatatacacgtttcagtgttattctttcaaatcatcccacccttgccttctcccacagagtccaaaagtctg

SEQ ID NO: 220 - DNA, 74878 bp, Hippotragus leucophaeus
  source 1..74878: mol_type = genomic DNA
tccgtgagccccgagggggcgcggcccgggagcggaggggatacctgcggcctctgtaacctctgtccggccgccgcctggcacaacgcaacccttgcagccggcgcacccgcgcacccccgcacacccctggcacccccgcgctccccgcggccacgggaggggcgggcgccgcagccgcctccgagctagctcccagggccccgcccgccccctgcctgccccgccccggccccggccccggcgggcgccccccgcggcgctgccccgcccccgccgtcccgcgctgccccgggccccggcccgccgcccggctgccggcccacctggctcagcgccgccctcggagcccgcgcaccggcgctcacccgcgcaccccgcgcaccccgcggccgcaggagggcccagcgccgccgcccgcgagctcccagggcccggcccgctccggcgcccgcgctctcggggcggactcctggccctccgagatctcccgcccggcgatggccccgctcggatatttcatgttcctctacggcctgaagcaagcgctgggcagctacccgatctggtggtgagtgagccttcctcacgttctccccggcctgtgtgcgtccctcagtcaccgtcccctcgggcagggccccgcggtggcccggagcccgcgctctgccctgccctcctgttccgcgggtggtttgttttccttggcggccactttcgacctgttcgggccggggctgggacgcgggtggcggagtttccggggacactgatctctcgggcatagaggagctcccggcgtcggacggggcgagcagtgagactgcgagaggcagaaactggaaccacacgagtggcacgaacgcttgggcagcccgaggtcaggagaagccaggagtgcgagctaggagagggcgatccgcctgagactttccttaaggacatgtcttacacaccacacacgcgcacacacaccttaaagcaaagtcagtgagacaagaccgaacagctcgaagcagcgtagttacgtaaagacagcggggacccggccgggagtggcgggcgcaccggggccagcacctggccctgctgcgtcttcctgctgcggtccccaccgagatgtaagagggggcttcgggagaggtaaagagggagaaagcatcgagtttgagggctccttagtgagaggctccgcaaacccacatccgagacgtcttccaccccagacaagacaccttcccgtgaaaccctcccaaacctggtgatggaagggcagaggaaccgagagaaggtcccgagggtctacagcacaaatccggagaggaggacggaagctactccggtagagtccccacaggcaagggtcacttcagctccccaggggagagggcaggggctctctgagatgcccaagatttgacgaacacggctgggggaaatacgagagccgaggggcctgaacgcgccgctggaggagacccagatcagagacaagccttcacatacacatgcgcgcgcgcgcacgcacgcacgcacacacacacacacacacacacacacacacacacaccaggaactctctccgacggcttgcctggaattataataattatgccgaggggaagttggggcggggggagactgagtgagccgaagtacatctaatccgataataatttttttcttcgagattgttcaggagcgggggcgccctaggtgtggggcgcgggtccaggcgcagcctggcgggacggggcggggctcaagaaggaggcaccggcgcttgggagaggtggttgggagaggtggcggggcggcggcgaagtgttgcggagaccccggcgcgtcccgcacccgcgcggcacctgcagctcctggctgcggcgggcgtgcctacgaacgcggggacactgactcccggggaaccagggaagcgcgtcggagagagccctcggccgcctgctgccgcgggggcctctaattagaacccgccgccgctgcattcctgggcgctagaggaagcgccttcgcccccgcgcttcttccagaaagaagggccctgtcaccagcctctggccacccaacgccgttgaatgtttgtcctctcggccctgaaagtccctggccttgctcccctcaacacacctatgccacccctgccgcctgggccagatgtgttccatctgaaagatcctggggcttgcttggtgcttccggcattctccaggtgagtggggaggggcgtcctgtccccaccccctccctttcaatggcccacccaatcaagagtctagcgcaactctaaccccaaagggaagagcgtgccatggaaccgccccccgccccactttgctctccataggattctcgcactcagtggttctcttgtttcttgagaagcatctttgggggccacaacctcagggctcattgaggaccagcacttttctctcttccttccctctgcccccaggccatctggacacagcaaggatgtggtctctccacggtgcgcatgagcataatgaaaaggagggctcacaaagaaagaaatggcgtttaacagcagcaggaaggctctctatcttcatatccaacctaatggagtttcccacaggtggctccttctttttcttgcccaccccctctcctgcttccccacccctcagtgaggcattggagtggggggggaccctctctttataacttctcaccttcacactcagcctccctagttggtattccgtttcaccttccctccccaaaatgaagtcaccgctctcatcacttctccccaccccacccccaactcttgcatatgaaagtgaaagtgacagggacttcctcacctggagaaacaaggaaacagcccaaattgggagtaattaggctttgaagttggtgtagtcttggtgggagggtgcaaggggaggaggaggtggcgctgcatcccgtggggatttaaagagccaaccgcctccccaggaccatcttgcaagtgtccttcaccctagatgttcaaggtccaaagacaggtcccagcagaggcacagagagacagccctaaggccagaatgttgaaagttgctgagatctccaagaacgtgtgttctggtctcctcatgtgacagaggggtccagagaaggggcctgggaggtgacagaacccaggcctgggcacctgatcccagaggccagccaccagcatcccacgggctatgtactgcagacctacgaggaggcgccagccccttccccctcactcccctgatccagactgaattcttgtttaattagaattgatcagaaagatctgtgtgaatacagaacaggcatcatggtcaaggggaacacacagaaaccttgaagaactattctcagcacacagctgatgatgtgctgcaggcacctgccgcccacttcacatgtctgggctgatggcgtcttgtgagcccctcccctcccctggggctgaccctggaggtcagcctgttttctcccctgccccctccccacaaagccaggccccttcatctcctgcacgactgcaatgccccatcgcaccaccttctgcctctgttctcacctcccttgcaccctcccctctaaccctcctggagttccagcagcagtgtctttacctacacagagagcctggccctccttgtcctgccggtttgcctttcctgccctccggcaccccaccagtctctgctgtacctagagctccccagcactgagtggtacctggagtggatgtcagcccagctgaccccggaaattccccgtgaggcctcgtccagtcttctcccacccctgagccagctcagcagcctgggacagactcccagtgccgcattctcgcttctccccactctcgctgcttctccaccctcctccctagcccaccgcactccacacttgtttgtatgcagacaccctgctctgagcatgtatccagaccctaaggaatgccagcttggccatcacccctccacgcactctagaactttctctctgtacaaccttccctggtgttggctctaactggttcttcccacacaggggtcttctcagtcccaggcggaagacaggcttccccccgtggaccctgatgtttgtggggcacaagtgcacgtggaattcagggagaatgaaagagagctctaaaggcgctatgtgggacccgcagactcaaagggggtgtgggggagagtgaggaggaggaggggaaggtgagatgagcagccacacagaggaggaggttgcttgtgtcagacgacacgggatctgggagggctgagcaaggctcggcggcttctcaactgggaaaggcccaagcaagccagactccccgagctgccgttcctctgtgagcctgccccaccgcgggcccctccccagggcagccctgtccctcctcctgattcttccttctcaccccaccctgtttgtccctctctccatgtgtgtgtgtgcgcgcctctctacctctctgtctgtctctctctctgtgtgtctgtctgtcctcgtctctctctctctgtctatatttgtccctctgaatctctgtgtttgcctctgtttctctcttttctggtctctgtgtctgtccctctctctctctctgcctctccctgcagccctgaggctggtgatggtaccagctagcctatgaaacgtgtgagaaaaacgtgagagaaatccagatgccagttcaacacccttgatgttgtaagatctcagggtactgggaatgatgttcctccacagaaccaccagtggacatccttttattgaagagcagtgttggaaatgaccataggtaaaatatgtatgaccagaaatcttgttttctatcaccaagttgaatatgcatcatcttgatcccttgaaagcccaccatggaactcactccttccagaatgcaaaagcatcacccgcctctcacatccagcttgatgtgacttggccacctacacacttgggactctgtctgggactcagatggggcagcttcccccacgctagctaaccctgcatttcactgggcttcttgtcatctttttaaatgattctgttttatttgcacaaatctcctagaattctttgtgacagcgaagagggtgagtaaatacaatcaaggaggaacacagtctggagaggctataaaatcacacttttcacggtgggtctcacttacaaatctccagcctggaaggacagaagttgccttgttccagaggggctctgccaccatcgtgcaggccaggacagggaaggcagggtttgggtatacctcctgtccctgaaagtatcggttatattcaaactgtagtccacagaccagagcccatccatgcatggttgttcatgaagaaataagaacagaagttgaaaataggtattcaggaagaatcatggcagtttaaaaaatgtgttatgtattattttagcagacttttaatgtaatttataataatggattaggaatttgtgaaaccccaaacccaagttctgtagctacaacgggcagcttctgccatgcccaagtcaaagatcactccccttgaggctccatcacccagcacttgtcgtttacatttttgagccaagtcttagagtttgtatttacccctttcaagtgcaattgaaggactggagcctcctgttgttgagaagtgttgggggaacaccccactgcagtttggtgtgtgagaagctgttgggcaaggagtactggacttctgtgtggctccagcaaactctgggagcggaggctataggtagccagaaggcagattttggttcagtataggaaaggcttcctgagtctgagagtgctggtagtgagctgcccatccacgaaggggcagaagaagaggctgaggaaggaacagcctgccttggttggggggtgggggtgggggcttcccatagacactacagcggctgagaatccaaggtttacaagacccagctcctccccctccccgctcagcactgcagtcctcctggtaagttccctaaactcccctaggcacagttgggatagttcacagttacacagggatcagtgagcccaccctggcatgcctttgcccccccacaccccggcagcatgtccctgcatcccatctcacttcctgcagccttactcagctgatcccagatctgactcctcactccctgccagactgggccggatgctgtagggtaacacgaagaggtggagaataaggctctgactccggccaggctgcctgatccctgtgaaacctgcccccccacccccgccacccctttgtggaattgtcattagaacagcacctatatcaccaggctgtgagatcctacggggtatgtgttactcttccccccaaccttggcccttcaccccccgtagctgttagataagactttgttgaacaagtgaatgaaggaataaatgggtggaatatttcctatgaaaaacagaaactgcattgggtagcctgtgcttggggacatgaaaacatagctgactgttttcaccaccccctcgactgaacccctggctctggggctgggtcccccgccatgtaccaggccagctctgcctcggtctccctcccagtctctccaggtgacaccctggaggtgtctcacactttggtgcttccacattccttccccgacgaaacgtgccgctgccgcccagggaagcgggcaaatgcatggccgcgggcacgggagcctctgcccgcctgctgggacttgcgcaaagtatgtgtcagtaatcccggctcggcccggtggggcaggagagggtgctgggagggctgcaggcagggccgcgcagcccaggagctgggaagaggtggcccccgacaccagggacccaggtctcgggacgcccctcctcatgggccctcccattgccaaaagtgctccagctgctggggaggggtcttccaggcgagagagagagccagaaggcacgtgggtccctctgggagatgtcatagtgggtagggagagaaggcaaaacatggaatgccttggggcaaatgagcaccctcgggggagtctgggtcctatgagcctcctgaacagctccatctagaaaggacagagcctacccatcaagctgcgtagccatcaacccacaaggcaaccagcccatattcaaggcctccaggctgaggataggcacctggtccagtcatggagaggccctaaccttagaagacagcagtttaaaatgggacagtcactctggaattctcatgagttacgaggaaagtccatgggaccaaccacagtcctcctctgcagaggccctacaggcagactgggcaaccagggcccccagatgaggaatgagcagagatctgtgccctcgaaggacaagagaaagtgtggccgtgctctccccttgtggcccacatgtgggaggctgggcagaaggagtggcaagcttcagtggggtacagagagggcggctaggagcactgagggcccagagcgcttcctggagaggtgaccctgggtgctgtgtggatagaatgtgccccacccacccccaaggagtggatgaacccgccgtgcctatgactcacttccgctccagaagcctctgatagaatgtggcccaccacctccttggacagatggagaaactgagccccaggaaagaagggcaagaacagttcattcagtgaataacaagaggtggtgatcacatcctttcccctagacccagccaagccctcctccccacagggcccttctctctttgagaactgctgcgaggccccagctctcaacacacagccatggcaagggcagagctgtgcccacagtgcacaggtaccctgtgtttgctgatcttgcaaaaagaaatcaaaccagaactctagagagctgagagcctgtgactccattctgagctgtcagctaatggtgcacaagagtttaggcgctctgattgagggtccacccccaaaggacccaggcaggggcagcgggcagagggggtgtgctccaggtcctgcctttgccctcagcctctgtccatgagacgtagcttctgtcctcgggtctcaccgcacatttacagtaaactccgcttgagtgaaggccatcagcccaggggagcaaagctggcccagacggggtcctgagtggcctccttcccctacaagtcacagccagtgcctctcctctatcttgagtaagactgtctggcaacacgcctggcctttcaacagtgcaactgtgcagtcctcaacaggagcaaacaggggcagagggagaaaaaccattagtgcttttcggcggcaggcgtggctcacctggccccagccataggctggaactggagtctaggggccactttgcaaactgcacaagtgtgtgctctgggttgaaaatgatgctctcacctgcaaacaacttattactaaaaattaaccaaatagtagcattcagaaaaccctggaaaacaaacaagctcttcatcttaccaacttaatacaggcatttgctcactttaggttcttctcatttcgcttacacatttttcatgatcataataacagagtgcagagaagactatgtttgttttttaaggcttaccatcttccactaaacgtttggcgtttgtgggaccttctcagcggtggtgctagcagctccttgggcttgtggtgtgggtgcgctgtaatctccttgcctgactgttgcccctttctgctgtatgggtggccctgcaaggagaatctctcccgaatgggaacctagggtagaggctcaggcctcagagagggatcctccccatatctgcggggaagggatgcattcagtttgggacagtctgattttgaggggcctttgggacagcagatgggcatttaagattccagctcccagccagggggtggctgacagtggggatgcaggcacttcagggttggcagtaagaagggaaatggaacagattcctcatgggtgaatcaaggtggccaggtgccgggtgaaggaaatgggcgcagtgagtgcagactagcggggccctcacgccctgctggttcccaggaggagggcagtgcaccccctcctgtctggctttccctggggccacaggacacaggttttgtccatcagggcagggccattgacacctgaagtcatcattggctagaatatcctgtgctggcaatggccgtgaggaggaagagatcgcgcgagacaaggtcaggacctcataatgacctagatacacgggccagagggtaaatgagggggagactgaaaaattaacctgaagccccagacacccaggtaagaactcagagtgggttcctgagagattaatgagatctcgtccatgcttgtgacccctccagagagcccctctcagcaagaccctgagtttgcctcctctgggtttggaaaattctgaaggagatgggaataccagaccacctgacctgcctcttgagaaatctgtatgcaggtcagaaagcaacagtgagaactggacatggaataacagactggttccaaataggaaaaggagtacgtcaaggctgtatattgttaccctgcttatttaacttatatgcagaatacatcatgagaaacgctgggctggaggaagcacaagctggaatcaagattgccgggagaaatatcaataacctcagatatgtagatgacaccacccttatggcagaaagtgaagaggagctaaaaagcctcctgatgaaagtgaaagaggagagtgaaaaagttggcttaaagctcaacattcagaaaactaagatcatggcatccagtctcatcacttcatggcaaatagatggggaaacagtgtcagactttatttttctgggctccaaaatcactgtagatggtgactgcagccatgagataaaaagacgcttactccttggaagaaaagctatgaccaacttagacaggatattaaaaagcagagacattactttgccaacaaaggtctgtctagtcaatgctatggtttttctagtagtcatgtatggatgtgagagttggactataaagaaagctgagtaccgaagaattgatgcttttgaactgtggtgttggagaagactcttgagagtcacttgactatcaaggagatccaaccagtccatcctaaaggaaatcagtcctgaatattcattggaaggactgatgctgaagctgaaactccaatactttggccacctgatgtgaagagctgactcatttgaaaagaccctgatgctgggaaagattgaaggcaggaacagaaggggacgacagaggatgagatgcttggatggcatcaccaactcaatggacatgagtctgagtaaactccgagagttggtgatggacagggaggccttgtgtgctgcagtccatggggtcgcaaagagccggacatgactgagcgactgaagtggactgaactgggtttggaaatgggcagtcagtgcccggcctcaacatcatctttcccaccacagcatttcaggaatggtcaccgttgttgcttccttcttctgtcaccacctggctctttttaggatcctcactactcccagatgagagttggggtctggctcctggtgatctcacttatggcaggctctgcaatactaggctggagagaagtaagtggccagccccatggagacagatggggctctggagggtggggacacacttcctggccccactcctgagcctggctgagcgtgctctcccctgccactataacggaactcacgctcttagagagcagccctagaagttgctggaagccttgggatttagaagcaaaaatcaaagggaagcttgactgccagaccacagggtttggacttgaagcctcaggaggctccctggactcaaagtcccaggactcaaagttaggctcaccttcagtgatcccagaatcagtggttttcaaacacgagtaagagagagaagccccagaagggcctgtcaaagaagggcactggccccgaggctctgattcagcaggtccagggcagcactgccagagagtttgcacttctgacaggttccgtggcgcatgtgctgccagcccagggccactctaagagtgcccagctctgcctccagctgcctactgtgttggctgggaaaccaaggtgcaaaggccacagcaacaggcagagcagaccagccagggagcagatgggagccaccacacacattgcccctcagtgactgtttcatgctagaaacagtgtcatatcaaatgcaggagtcccacagtgttctgtgtctttgggattagtggtttctgagtggggtttgttcataaatatgacatttaccttactctctgtcataaactgcatgtccatattccccagatttatatgtcgatcccccaagccctcagtgtgatggtatcaggagggagggagggcctctgggaggtaactggggttagatgaggtcatgaaggtggagtccccatgacggaaatagtttccttaaaagaagaagacaagacatcagagttctctgtctgctgtatgagggcacagcaagaagctggccatctgtgaacccagagcccctcgccagaaccccatcacgctcacaccctcacctgagggctgtgagaaacgaatgttcactgtttcagccacccagtctatgctctttgttgtggtggcccacgctcaccaagataacggttcataaatgttatcttgcatgtactggtatttaatatattttaagagcgtaatagcatactggaaaggggaaaccaacgtgccaaaaccccatcctgccaaattaactcactgatgttggtcagctgtctttctctacccccagcttcttggtccaggagattccctggggttccactgaccaggttgcataggttggagagactcatatagtaggcagggctaggcgcaggaccacacaagtgatgctggtgggataggtgggccagataagcagcttggcttatggaggaagaaaagattccaggggcttgaaaagaagaagtaatcagcctccaggagagtggtagtgggtctctgaggaggggtggtgttggggacagaggcagagaaaggggaggaagggaagagctgtctaaaggttgtggtgaccagcccttgaaggcggcagtggcttgaatctggaggggccgcctccctgtgaggttctgttcctcctggcctgcgcagctttgagggcaagagaaaagagccagcgtgagcagaggagacagatggggaatatttagtctttgctgagtaacaaacgaccagagttacggattcacacagcatctgtgcgttagttcacagctctgcaggtcagagatcttggtggtttgcctgggttttctactcctagtgtctaaaggccaaaatcaaagtgttggccaatctagcaacaaatattctcccgacctcacccagctgtcaaattctggtccgtgcggtctccatgttcttgcagctgtctgccagggtggttctcagctcctcgaggagactttctggtctcggattgcagcaccttcatctcagagccagcaacagcttcagacgctgttgatgtctctgacttctgctaccaggtgaaggctctgctttgaaagcatgcttgtggttagatgaacccggattggtggccctgatctgtgtctgctttccactgcatgtcttgcagatagagtaagtgtactctgtctgtattcacagtcccaggcaggaaggtgggcactcttgaggccttgtgagcatctggacttgctgggtaggagagcaggagagcaaccacctccttcaaggtgtgcacagccgctctctgtcccatcccctcaaaccacgtgggtgtgtgctaagcggcttcattcatgtctaagtctttgtgaccctgtggaccatagcccaccaggctcctctgtctaggggattctttacaggcaagaatactggagtgggttgccatgcccccctccaggggatcttcctgacccagggatcgaacccatgtctcttatgtctcctgtgtttgcagacagggtctttaccactaacaccacctgagaagctcaaaccacatgtcccttcccaaatgctcctgagctatctccctctgggcgccagtctgctgggacaagaaaataacatctttatttgtacccaccactaactgcggtcaaactcaccttcagttatgaatggaggtgacaaaccgcaacagcctttgtggttttctgagatgctatcaccaggggaaagcagatactttcatctcagaagatggcggcagttggtgcagagattacaacatgcccttgagccctcagcccaccatgtaggctcagtaaagaaactcatggtcctgaatcacaagcttgttccctgtcgttgtaacctgatgtcagtctgcttgtttgcttgtaactgtttctttcttctccacctggctctgggatgatggcttgactctagagcagagagtttctacaggccaaacctgcttccccaagtgcccacatctcacatagtcggtttgtttatcaggatggggaccttgctagggcacagccagacacaggctgactctggcagtctctccatggacatccttctctagtccagggcctgacgcaggagtcccggctgcatttgctgttattgccttttgtgtgctctgggagcttggggagcacagagcaccgaggtggcagcgccctgcagtagcagcactcttcagctgacagcatccctctcccactagtctctagttcctggagagacccttaaacgggacagtgcatggttgttcctggggtctggggcccagagtcctggtggatgctgctccccaccaacctgtccagctcccagccccaggtcaatgcaccttccacctcctcccagaagattaggggaggaaggagttacaaatcttcatcttccaagtattaactgactgagggtacctacctccgcctcagattagaaatttgaatcttgggagcgttgagaagatagcacatgtccagtctggagttttcttccagctttaaggagatatagttgacatataacattgtgtaaggttagggtgtacgatgcaattatctgatgtatgtccgtgtaataatgatgtatatattgcaaaatgattaccacagtaaggttagtgaatacacgttgaatattcaatataagtttttatgaaccaatttatccttgaaggctcacccaaaattcagtgacatcacttgggcccctgtgacccttctctgccccctttctcccacacacagactcctcccatgtctgacaggaccccccagctttctgccctacatgggcagggtctgcatcaccaggattctcttggttgcccagctctgggacagaggaatctttctggaaataatccaaggaatttaaggggccatcaggtctagggtgggtggaagagggatccagctgggattggtggaggctagaacaggggcgtggcctctgggctaggagctggctgccagcactctggccttgcttggggagtggtaatatgggtcctgaatgggaagagggcctggagaaggcaggcgcggggcgctaactcagcaccgcaagcttgggacgagcctgggaagaagccgtgacctcgggagccccactctgctttcccctggcaggatggggagaggtggggagcacccaggtggggacaggctgtgggctctggggatgggcagctcagcccccgcccacagtgtgccccggcatcttacagggggacaagcaccgtgggactggtgaggacagagagagatagaatccgctttttttttttctgtctgaattaagtggccctttgtttttccacttgttctgagtctccaagtacataaaaccagtaaaaaaaaatccacttagaaatcaattgagtggattttccttctgacagaccctcttcatcccttctccagtttgagcccggctgccagcaacggaagaggagagaaccccacgaacctcaggagccagcccccttcagaaaggctccaagaccagagccacgaagggcaaaccctaccctaatgctccatcaggaaatgttcaaacatccaaaaagatgcagggcttgaacaaagaacatcatacactgggtcatgcacattttgcttgacccagtgtattccatgcctcaccatcccttctattcacccactattcactgtgtgtttttatgagacctcaatccactctttccctgaagactttggctggctcatcattaactagagttcaacatttgtttgcaaatcacatcccacgtggagcgtcaaaatgtggaacacatgggtgcaaaccatcctgaatcacagagtggaagagccagaggtgagcagggcagcctcacctggagtgacagctcgttcctgcttaaaaaatccctggtggtccagtggttaaaaatccaccttgcaatgcaggcgacaccagttcaatccccggtccaggaggatcccacatgctgcggagcagatagactgttgcaccacaactgctgagccagcactctagagctcacgagcgcaactaaggaagcctgctcaccctggagcccacgctctgcagcaagagaagacaccgcagtgggaaccccatgcgctgtaactagacagtagcccccacgcgctgcaactagagaaagcctgctcagaacaacgaagacccagcacaaccaaagataaagtaaaagaaagtggagtcgctcagtcgtgtccgactctttgcaacccgatggactgtagcctaccaggctcctccgtccatgggattttccaggcaagaatactggagtggggtgccagggtcactgtgagaggtaccacacgctggaaacggatggccaacctgagccaggcacagtcagagccagccacatatgccgacataggcagagtggttaccggggccaagacagggatgtctcagtgggtgagaggggacagaaattggctgaactaagttggggaagtgatggaggtgacagtgttctgaaagagaactgaggtccagggagtttcaccctctgatttataagtgggaagtgaaaggaaccattagttgttcagtcatgtctgactctttgtgatcccacggactctagctcgcccggctcctctgtccatgggtctccagccaagaatactggagtgggttgccattcccttctctgggggatctttccaacccaggaattgagcccaggtctcctgcattgctggtggattctttaccaccttagccaccagggaagtgggaggttatccgcaaaagctcagagggagagtggcagaaggcatgcaggttagacacagtctacctcacctgctgaccctcaccaacccatcctggacatctgaactcagcctggagtgggcagagctggcccatgctctccaccctgaagtccttaccctgcccactgggtgccttcaagagcagagactgctgaccctggcctgcatgccacctctcagtccaagtgccagctccccccatcctccttggcattgcctttctttgggactggaatgcgtccagcccatgctggtccatcaggaagccaaacacctcggtcagcacaggggtcccagagagacagcagcagcccctgcagtctccgctcagagccgtctgtgcaggacagagtgcaggacagcgaggctcagactgcagaatactgcctagagaggagagacctcacagctggatgagaaaagagggctgcccttcctaaaaaccttggggtcccagaccctggggtgggtgtgggagaaagctgggagggtcaggcctcaggaacctaggattcagtaggctttgcagggaatgaaggaagaagtgagggaacaagccagccccacagttggaatgccactccaggaatacagactcaggcagggccatggggatgtctgtgacatctgctgtgaggtcatggctgggttttgcctcatcaaggcacgaggatgtataggatggagactgcacccaggaaggggtgtcagattagggcacagacgtgagagggacccaggagacccagagtctggtttggaggcttcaggttttccctagaaatggaggcgctagcaccatgaaaagaagtctcagctcttcttgagcacgtggatgcatggtgtcatggacactccccggggaaagataggttttaactcatgagagatgcacttgatcaggaaggaagagcaagctgaagatagaggttgcccagaaatggtgggcagaatgggcacaggatgagaggatgccaaacttgggaaaccctgtgttcaggacttcaagaagttgccctctcctcagccagctagctgaatatagagctacataagtgctgcagtggggaggtgtagtgggtgacgctcacacaggacagcagggggattgtgggagacaaaagcaactctgtgtggccgcagagttctgtctcagtctctgtggggtccctgggtcctggtgcacacaaggtttctttgagccctctgagcgtctctgatgggaatggggtttgattctgaacatgaattcggctctcctaccatcttgctggggcttctcctttgcccttgggtgtggggtatctcctaccctacgtgggatattctccttcaagaatacacagaactatacaaaaaagatcttcacgacccagataaccacgatgatatgatcgctcacctagagccagacatcctggaatgtgaagtcaagtggggcttaggaagcatcactacgaacaaagctagtggaggtgatggaattccagttgagctatttcaaatcctaaaagatgatgcgggaaagtgctgcactcaagatgccagcaaatattggaaaactcagcagtggccacaggactggaaaaggtcagttttcattccagtcccaaagaaaggcaatgccaaagaatactcaaactatcacacaattgtattcattcacacactaataaagtaatgctcagcaagtgcgctcggcggctgcgcggatccgtctcttgcttcaacagtgcttggacggaacagacccagggacgccccttgctccagcctccgaccaccctccaacctattttccagttgtaacctccagagtcagccactcagctgtccgcgatcaccgggaccagccaccattttttaactccttattattaccgaccaatcatgagctcccagattcgtcagaattattctaccgaggtggaggccgccgtcaaccacctggttaacgtgcaactgcgggcctcctacacctacctctctctgggcttctatttcaaccatgacgatgtggccctggagcgtgtgggtcacttttttcgcgaactgaccaaggagaagcgcaagggtgcggagcgtctcttgaaactgcaaaaccagagtggcggccgcgccctcttcctggacgtgcagacgccatctcaagatgagtggggtaaaacccaggacgccatggaagccgcccttctcgtagagaagaacctgaatcaagccctgttggatctgcatggcctggcttctgcccgcggagacccccacatctgtgacttcctggagaaccacttcctagatgaggaagtgaaattcatcaagaagtcgggtgaccacctgaccaacctccgcaggctggctggtccccaggctgggttgggcgagtatctcttcgaaaggctcaccctcaagcacgactaggagcttctggagaccagtggccgttgaagaacccaccacacatcagggctgcctgaaccccctctctgcagccactaggcagctttttaacaccctggagccctctctcaagccttggaccaaatggaaacaataaagctttttgcagcaaaaaaaaaaaaaaaagcaaagtaatgctcaaaattctccaagccaggcttcaacagtatgtgaaccgtgaacttccaaatagtcaagctggttttagaaaaggcagaggaaccagagatcaaattgccaatattcgttagattattgaaaaagcaagagagttccagaaaaacatctatttctgctttattgactatgccgcctttgactatgtggatcacaacaaactgtggaaaattctgaaagagatgggaataccagaccacctgacctgcctcttgggaaatcagaggtcaggaagcaacagttggaactggacatggaacaacagactgattccaaatagggaagggagtacgtcaaggctgtatattgtcaccctgcttatttaatttatatgcagagtacatcatgagaaatgctgggctggatgaagcacaagctggaatcaagattgccgggagaaatatcaataacctcagatatgcaaatgataccacccttatggcagaaagtgaagaagaactaaagaacctcttgatgacagtgaaagaggagagtgaaaaagttggcttaaagctcaacattcagaaaactaagatcatggcatctggtcccatcacttcatgggaaatagatggggaaacactggaaacagtgtcagactttatctttttgggttccaaagtcactgtagatggtgactgaagccatgaaataaaaagatgcttactccttggaagaaaggctatgaccaacctagacaggatattaaaaagcagagacattactttgccaacaaaggtccgtctagtcaaggctatggtctttccagtggtcatgtagggatgtgagagttggattataaagaaagctgagtgctgaagaactgatgcttttgaactgtggtgttggagaagactcttgagagtccctttgacttcaaggagatccaaccagtccatcctaaaggaaatcagccctgactattcattggaaggactggtgttgaagctgaagctccaatactttggccaccttatgtgaagagctgactcactggaaaagaccctgatgctgggaaagattgagggcaggaggagaaggggacgacagaagatgagatggttggatggcatcattgactcaatggacatgagtttgagcaaactccaggagatagtgaaggacaagcaagcctgacatgcttcagtccatggggttgcaaagagtcggacacaactgagtgactgaacaacaatcacgaatagtaacatgaccacatttcaatcagttgtgacacacaaacacatgtgtaaccaacagccccatcaaacacagagcacttccttcaccctagaccctagtggtccagtagaactttccacaatgaccgaaatgttcttatatctaaccatccaacatggtaaccacatatcatacctagctagtgtgactaagaaaccacatttttctctcattttttgtcattttgcttaaattaaataggcacatgtgctgagtgggaaccatttggcagagcacagcctgagacacattttctcatgctgcctttcagagaggccagacctcccatgagaatgaggaaactatcctgatttctgtacctatctacagtgttgctgggccttggtctccatcataggaatcgcgatcacccgcactgtatcaggtctcccttaagctccctgcctgggagatccctgacctttgcaccagcaggccactcctctctatttcgacgtagcattccactgcaagagtaaacgctgtctgttcatccacgcttctgtggatgcatccttcggtggcttccaagtttttctctgatgatcacagccctgtgaatattcttgagcacatcttattgtgtacataagcttttatatctgttgagtaaatagccaaaagcctgctggtatggtgggcatgagttcagcagtgattttcgcctatatgatttatttacccactgctgtgccccatctctatgtgtgtgcatgtgtgctaagtcgcttcagtcatgtctgactcttggtgatcccatggactgtagccccccaggctgctctgtccatgggattctccaagcaagaatactggagtgggttgccatgccctcctccagggtgccctatctctaactccactctaacggcagaaagcaaggaagaactaaagagtctcttgatgaagatgaaagaggagagtaaaaaactggcttgaaattcaacattcaaaaaactaagatcatggcatccggtcccatcagttcacggcatacagaaggggcaaagtggaagcagtgacagattttcctttcttgggcttcaaaatcactgcggacggggactgcagccatgaaattgaaagacacatgctccttgaaaggaaagctatgacacttggacagcatattaaagaataaagacgtcaccttgttgacaatagtccatatagtcaaagctatggtttttccagtagtcatgtacaggtgtgagagttggagcataaaaaaagctgagcactgaagaactgatgccttcaaattgtggtgctggagaagactcttgtcccttggactgcaaggagatcaaaccaatcaagcctaaaggaaatcaaccataaatattcattggaaggactgatgctgaagccgaagttccaatactttggccacctgatgagaagagctgactcactggaaaagatcctgaggctgggaaaagttgagggtaggagttaagaggatggcagatgataagatggttagatagcgtcattgactcaatggacgtgaacttgagcaactccagaagatagtgaaggacaggggagcccggcatgctgcagtccctgagctggacatgacttagctactgaacaacaacaagatgccctatccccactgctctagaagtgattgtcctcctgccacagggccagcagcacctcctctgggcagcccctgtactaactcagcatcacctgtatccttgagtgctcctgtgtgttcctgaacagtttcagggtgctgctatctccacaccattggagccaggacccctgcagttgtgcagagaagcagggaagcctccaccacttccttgatttctcttctgtcaatccacgtgcacatcacgatgttttgtgccaagtgtcaggtacaggacagggacaggcttcctccatggtagaagcacatcttgcccaaagaaagggcctgtgtgcatcctccaaagaaagttcaccctaggacaggcctgactcctgctcccggttcacgggccagaagggcacttcccctactaaccaggcctccttgtcctcccccaggtccctggctgttgggccccagtactcatccctggggacacagcccatcctctgcgccagcatcccaggcttagtacccaagcagctgcgtttctgccggaactacgtggagatcatgcccagcgtggcagagggcatcaaaatcagcatccaggagtgccaacaccagttccgtggccgccgttggaattgcaccactatcaacaacagcctggccatctttggccccgtgctggacaaaggtacaggtggtacccatcatggctagccaggcagaggcggcagcccagggatgtgggtgcagcagggctcaaaccagcttccccctcagtgggagtgggcacaaaccagttcatttcctttctgcctctgtttctcacttgtgctcaagcataggaacagcacttccagtaaggggggcagtgctcgttactatagggatctcctatgtgggtcctttcccaatgctcacccactctggagggtgctcctggagtttgggaagggtataggatcacacagagattcctcctgcttcctctttcccaaaaaacagttacacagtttcacggggacaggattaactactgcagttttcctgaagaagccaggacttcaggcagatcttagagagaaaatacaaaaacaaacagaaaacacaaaaaagggtgagggttggggatgatagaggcacacagcagaagttatccagggtcctggagccagggaagaagaggaagatctggcaggctgggtgctggttaactcttggtgaagagcaaatttgcacaagacatagtagtttaaacaataataatcacgtgttgtcagttccaacatctgcagacatggggagatgcagtaggcagggctggtctctgctaacgagagagacaagctgatcctcatctctcttacatgcctggtggcccctgatgcttctgctcatgacctgggttcgcttaaatgcagtggctgggccctccagcaagtgaggaaagagggagggagagagaaaaagagaaagggagagagaaaaagagaaagggagagaggcttctttcactgagcataatgttttcaagatgcatccacctgtagtatgttctggtgctttattcctttttatggctgagttatattccatcatacaatggatcacattttatttatccattcatctgctgatgcacaattaagttgtttcaagccttttattgtctgttgtgaataatgctgatatttcaagtatctgaatacctgtttttcaattcttctgggtatattcctagaagtagaattgcatagtaattctgtgttttgaggaactgccaaactttttccacagcaactgcaccattttgctctcccaccagcaacacaagactgttccagtttctccacattattgccaatgtttttctttttttttcctttagccctcccagtggatctgaagtgatgtctcattgtaatttttatttgcacatccctgatggctaatgatgttgagcatcttttcatgggattgttgaacatctgaatgtcttctttggagagatgtctatgcaagtcctttgcccagtttttaattggattgtttgtgtttctattgttgagctgtcagaattctttatatatctaacactagacacttatcagaaatataattttcaaatatcttctcccttcatagattgtcttttcacttttatgacagggtcctttgatgtacagaagttttaaattttgatgacattcaatttacctatttagatatcatatcaaagtaaacattgcctaatccacagttatgaagttttacacttgtgttttctcctaagagttttatagttttacttcttacatttaggtctttgatctatttttagtgaatttttgtatatagtgagaagtaagggtccagcttaattcttttgcatgtgggaaaccaattatttcagcaccatctgttcaaaagactagtctttcccctattgaatagtcttggcaccctggttaaaaatcaattgtctatgggtgtctgggtttatttctggactttcagttctattccattggtctatatgtctgccattcttccaatacaacactattttgatttctatagttttatagtatgctttagagttgggaagtataagatctccaactttatttttattttacaattgcttttgctttgattgttttggcttttggagaatcccttacaattccatatgaattttagggttgttttttcctttctgcaaaaaaagatttttttgaattttgatggtgattgcattgaatctgtatattagtttaagaagtattgccatcttaacattattgtcttctaatccatgaacatgggatttttccatttatttaggtcttccttaatttttcagcagtgttttatagttttcaatgaatgagtctcatgcatctttggttaatgtgttcctaagtattttattcttttgatgctattataaaataaatcatctcattcatttctttttcaaattgttcactatgtgtagatgtacaattgattttgtgttttgaacctgtatcctgcaaatttgatttttttcattagctgtgagagtttgtgtagattctttagaattttctgtatatgagatcaagtcttctgtgaatagaaatgtttttgcttcttgctttccaatttggatgccttttctttctttttcttgcctaattgatctggctagcacttccagtactatgttgaatgtgagcaatgagagtgggcacccttgtctttttcctaatcttagagggaaagcttttagtctttcaccattgagtatacggtgctagtagtgaatttttcataacttccctttatcaggttaaggatattgtcttctattcctaatctgttgagtgtttgtatcatgaaaaggctactcagttcagttcagttcagttgctcagtcatgtccgactctttgcaaccccatgaatcgcagcacaccaggcctccctgtccatcaccaactcctggagttcactcagactcacgtccatcaagtccgtgatgccatccagccatctcatcctcagtcgtccccttctcctcatgccccaaatccctcccagcatcagaatcttttccaatgagtcaactcttcacatcaggtggccaaagtactggagtttcagcttcagcatcattccttccaaagaaatcccagggctgatctccttcagaatggactggttggatgtccttgcagtccaagggactctcaagagttttctccatcaccacagttcaaaagcatcaattcttcggcgctcagctttcttcacagtccaactctcacatccatacatgacaactggaaaaaccatagccttgacgagacagaccttagtcggcaaagtaatgtctctgcttttgaatatgctatctaggttggtcataacttttcttccaaggagtaagtgtcttttaatctcatggctgcaatcaccatctgcagtgcttttggagcccaaaaaaataaagtctgatgctgtttccactgtttccccatctatttcccatgaagtgatgggaccagatgccatgatcttcgctttctgaatgttgagctttaagccaactttttcgctctcctctttcactttcatcaagaggctttttagctcctcttcactttctgccataagggtggtgtcatctgcatatctgaggttattgatatttctcctggcaatcttgattccagcttgtgtttcttccagtccagcgtttctcatgatatactctgcatagaagttaaataagcagggtgacaatatacagccttgatgtactccttttcctatttggaaccagtcttttgttccatgtccagttctaactgttgcttcctgacctgcatacagatttctcaagaggcaggtaaggtggtctggtattcccatctctttcagaattttccacagtttattgtgatccacacagtcaaaagctttggcatagtcaataaagcagaaatagatatttttctgaaactctcttgctttttccatgatccagcagatgttggcaatttgatctctggttcctctgccttttctaaaaccagcttgaacatcagggagttcatggttcatgtattgctgaagcctggcttgcagaattttgagcattactttactagcatgtgagatgagtgcaactgtgcggcagtttgagcattcttttacatttcctttctttgggattggaatgaaaactaaccttttccagtcctgtggccactgctgagttttccaagtttgctggcatactgagtgcagcacttttctagcatcatctttcaggatttgaaatagctcaactggaattccatcaccttcactagctttgttcatagtgatgctttctaaggcccacttgacttcactttccaagatgtctggctctagattagtgatcacatcatcatgattatctgagtcatgaagatcttttttgtacagttcttctgtgtattcttgccacctcttcttaatatcttctgcttctgttaggttcataccatttctgtcctttatggagcccatccttgcatgaaatgttcccttggtatatctattttttttttgaaaagatctctagtctttcccattctgttgtgttcctctatttctttgcattgatcgctgaagaaggctttcttatctcttcttgctattctttggaactctgcattcagatgtttatatctttccttttctcctttacttttcacctctcttcttttcacagctatttgtaaggcctcctcagacagccattttgcttttttgcatttcttttccatggggatggtcttgatccctgtctcctgtacaatgtcatgaacctcattccatagttcatcaggtactctatctatcagatctaggcccttaaatctatttctcacttccactgtataatcataagggatttgatttaggtcatacctgaatggtctagcagttttccctactttcttcagtttaagtctgaatttggtaataaggagttcatgatctgagccacagtcagctcctggtcttgtttttgctgactgtatagagcttctccatctttggctgcatagaatataatcaatctgatttaggtgttgaccatctggtgatgtccatgtgtagagtcttctcttgtgttgttggaagagggtgtttgctatgaccagtgcattttcttggcaaaactctattagtctttgccctgcttcattctgcattccaaggccaaatttgcctgttactccaggtgtttattgacttcctacttttgcattccagtcccctataatgaaaaggatatcttctttgggtgttagttccaaaaggtcttgtaggtcttcataaaaccgttcaacttcagcttctttagcgttactgcttggggcatagacttggataactgtgatattgaatggtttgccttggagacgaacagagatcattctgtcatttttgagattgcatccaagtactgcatttcagactcttttgttgaccatgatggctactccgtttcttctgagggattcctgcccgcagtagtagatataatggtcatctgagttaaattcaccctttccagtccattttagttctctgattcctagaatgtcgacgttcacccttgccatctcttgtttgaccacttccaatttgccttgattcatggacctgacattccaggttcctatgcaatattgctctttacagcatcagatcttgcttctatcaccagtcacatccacaactggatattgtttttgctttggctccatcccttcattctttctggagttatttctccactgatctccagtagcatattgggcacctaatgacctggggagttcctcttttggtatcctatcattttgccttttcatactgttcatggggttctcaaggcaagaatactgaagtggcttgccattcccttctccagtagaccacgctctgtcagacctctccaccatgaccctcctgtcttgggttgccccatgggcatggcttggtttcattgagttagacaaggctgtgggcctagtgtgattagattgactagttttctgtgagtatggtttcagtgtgtctaccctctgatgccctcttgcaacacctaccatcttacttgggtttctcttatcttgggtgtggggtatctcttcatggctgctccagcaaagcacagccgctgctccttaccttggacgaggggtatctccttactgccaccgttcctgaccttcaacgtgaaagtcaggaaaaggctactatattatatcaaatgctctttctgaatcaattaagatgatcacatggttttgccttcattctgttgacatggcatttcttctaaggaattcttgcccacaataatagatataatggtcatctgaattaaatttgacctttctgtccattttagttcactgattcctaacaagttgatgttcactctttccatctcctgtttgaccacttccaatttgccttgattcatggacctaacattccaggttcctatgcaatattgttctttacagcattggactttactttcaccaccagacacatccacacctggctgtcgtttttgcttttgctcagcctcttcattcctcctggagctatttctccactctcttccagtagcacattggactcctactgacctggagggtgggggtctcatccttcagtgtcctatctttttgccttttcatactgttcaaggggttctcaaggcaagaatgctgaaatggtttgccattcccttctccaatggaccacattttatcagaattctgtaccatgacctatcagtcttgggtggcacaacatggtctgattcatagtttcattgagttacccaaggaggctgtggtccatgtgatcatttggttagttttctgtgattgcagttttcattctgtctgccctctgatgagtgcaaaaggcttgtgcaagcttcctgatgggagggacttgtggggaaaactgggtcttgctttggtgggtaaggtgatgctcagtaaatcttcaatgtaattttctgctgatgggtgaggctgtgcttcttctctgtggtttggcctgagacagcccagtcctagagtctgcagtctctatggtcagctataggctctatggtaggggtaatggtgacctcttccaagaggactcatgccagcatgctgcacctcccaggactactgctgccaaaaccccgatcctgaagccagccaccgttgactcacgcctctgctggagactcccatactctcacaggcaagtctggctgagtctcttgtggggtcactgctcctttctcttgagtcttggtacacacaaggttttgtctgtaccctccaagagtttgtttcccctgttctgttgaagttctgtaatcaaatcccattgaccttcaaatttcctgggaatattcagtccctttgctgaatccccaggatggggaagtctgttgtagggcctggagcttccataacagtgcaagaatttctttggtataattgttctccagtttgtagatcgcccacccattggttctttggtaaggttaatggcgacctcctccgagaggatttatgccacatgccctgcctcccaggactgctgctgccagtacccctgtccctgcgactggccgctgctgacccatgcttccacaggggcccctcagacactaacaggcaggtctggcttagtctcctgtgggatcactgctcctttccctgggtcctggtgcacacaggttttgtttgtgccctccaagagtctttgggaggtatgaggtttgattttaatcatgattgcaccctccctaccgtcttattgtggcttctcctttgtccttggacatggggtatctttttttggtgggttccaacatcctcctgttgatggttgttcagcaactagttgcaattttggtgttctctctggaaattgagtgcacgtccttctacttttctcacacatatatatatgtatgcaagattatatatatacacattaatatacagtatttatttttctcttttgacttacttcactctgtataacaggctctaggttcatcatctcaattcagctgactcaaattcattcctttttatggctgagtaataggccactgtataatatgaccacatcttcttaagcattcatctgttggccatctaggttgcttccatgacctggcattgtaaatagtgcttgaatgaacattggggtacacgtgtctttttcagttagggttttctcagggtatataaccagtagtgggattgctgggtcatatggtagttctatgtttaactttttaaggaaactccatactgttctccatagtggctataccaattcttttttctccacactctctccaccatttattacttatggactttttgatgatgacaattctgactggtgtgcgttggtacctccttgtagttttgatttagtatttctcaaataattagtgatattcagcatcttttcatgtgtgttttggccatctatatgtcttctttggagagatgtctatttaggttttccactcattttttgattggatttttttgttttttgatgttgagctccatgagctgtttgtatattttggagatattatttgtgtatatttgtatatagctaatatttgtatatattaatttatttgtatatattaatttccctttcagctctatttgtatatattaattctttgtctgttgcttaatttgcaaatattttcacccattctactggagtttccctggtggctcagatgataaagaatctgcctgcaatgcaggaggatttccctgacagctcagttggtaaagaatccacctgcaatgcagaagaccccagtttgattcctgggtcaggaagatccactggagaagggataggctacccactccagtattcttgggcttcccttgtggctcagctggtaaagaatccacctgcaatgcaggagacctgggttcaattggtgggttgggaagatcccctggagaagggaaaggcaacccactccagtattcttgcctggaaaatcccatggatagaggagcctggtgggctacagtccatggggtcacaaagagttgaacacgactgagcagctaacactttttttcctttacccattctgagggttgtgctttcattttgcccatggtttcctttcctgtgcaaaaacttttaagtttaactaggcccgatttgtttatttttcttttaacattttcattattctagaaggtgcaagaacttctttgcaaaaaaggatcttgctgtgatttatgtcaaagaatgtttttttctatgttttcctctaagagttatatagtgtctggacttacatttaggtctttaatccgttttaattttacttttgtgtgtgatgttagggagtattctaattccattattttacatgtagctgtctgatttcccagcaccacttattgaagaggctatcttttctccattgtatatttttgcctcctttgtcatagatttggtgaccataggtgcgtgggttaacttatgggctttctatcctgtaccatggatctatttctctgtttttgtaccagtaccatactgtcttgattactgtagctttgcagtatagtttgaagttcggaagcctgaatcctctagctccatttttctttctcaagattactttggctctttggggtgttttcatacagactgtaaaaatttttgttctaattctatgaagaatgccattggtaatttgataggaattccatggaatctgtagtttgctttaggcaatatactcattttcattatattgattctttcaatccaagaacatcatatttctctccatctgtttgtgtcctccttgattttcatcagtgttttatatttttctgaatacaggtcttttgccttattaggttggtttattcctaggtattttattatttttgttgtgatggtaagtgtgattgtttccttactttccctttctgctctcttattattagtgtgtaggaatgcagaagatttctatgccttaatttgtatcctacaactttgccaaattcactgactatgtccagtagttttctggtggcatcttaggattttctgcatatatactatcatgtcacctgcaaacaatgacagttttacttcttattttccaacttggattccttttatttctttttcatctctaatatccatggcaaggacttccaaaacaatgttgatgagaatggacatccttgtcttgttcctgatactaggggaaatgctttcagtttttcaccattgaaactgatgtttgttatgtattgcctttattatgttgaggttccctctatgctcattttccagagagaatcatagacggttgttgaattttgtcaaaagctttctctgcatctattgagatgatcatatggcttttattctttaatttgttaatatggtctatcactacataaactatcacactgattgatttgtgtagattgaaagatttgtgtatatttctgggataaatcccacttgatcatggtgtataatccttttaatgtattattggatgctgttggctagtattgtttttaagcatttcccaatgattttaaatcaatttatttgtaaaaacagaaaaaggaaagaaataaataaagccagtaacagtagtacagtcgatacagttgctaaggcattaataacttataaaagacatagtagctacataagtggaaaaggaaatggcaacccactccagtgttcttgcctggagaatcccagggacgggggagcctggtggactgccgtctatggggtcgcacagagtcagacacgactgaagtgacttagcagcagcagcagcagcagcagcagctagataagtgtgtgtgttcacttgctaagtcatgtccaactctgtgaccacatggactgcggtagccagacttccttatccttcactatctcctggagtttactcagattcgtgtccatcgagtcagtgatgctatctaaccattttgtcctctgccacgctcttctccttttgcctacaatctttcccagcatcagggtctttttcaataggacagtacttcacatcaggtggccaaagtattggaacttcagcttcagcatcagtccttccaatgactattcagagttgatttcttttggaattgactggtttgatctccttgcagtccaacagactctcaagagtcttctccagcaccaaaattcaaaagcatcaattcttcagtgctcagccttctttttggagaaagaaatggcaacccactccagtgttctaatctggagaatcccatgaaaagaagagcctggctggctacagactatggggttgcaaagagtcagccaagactcagcagctagacaacaacaacagccttttttatggtccaactctcacatccatacctgactactggaaaaaccgtagcttttactatatggacctttgtcggcaaaatgacgtctctgctttttaatactctgtctaggtttatcacagcttttccctcccaggagcaaaagcgtcttttattatcacagctacagtcactatccacagtgattttgaagcccaataaaatataatatgtcactgcttccactttttcctcttctatatgccatgaagtgatgggcccggatgccacgatcttagtttttagaatgttgaattttaatctggcctttccactctcctatttcaccttcatcaagatgctctttagttcctcttcactctctgccattacagtggtattatctgcatatctgaggttgctgatatttctcctggcaatattgattccagcttgagttatccaggctggcctttcccatgatgtaccctacatatacattaaataagcaggatgacaatatacagccttggtgtactcctttaccattttgaatcagtctgctgttctatgtctgcttctacctgttgcttcttgacctgcatacaggttttttaggagataggtaaggtggtctggtattcccatctctttaagaattttccacagtttattgtgaaccacacaatcaaagactttagtgtactcagtaaagcataagtagatgtttttctgaaattcccttgctttctctatgatccaagaaatattggcaatttaatctctggttccttggcattttctaaatccagcttatacatatggaagttctcagttcatgtactgctgaagcctagcttgaagaattttgaacataacctttctagcatgtgaaatgagcacagttgtaaggtagtttgaacattctttggctctacacatggacatcaccagatagtcaataccaaattagactaattatattctttgcagacgaagacagaaaagatctatacagtcctcaaacagaagacctggagctcactgcagctcagatcatcagtcccttattgcaaaattcaggcttgaactgcagaaaataggaaaaaccattcagatttgacctaaattaaatcccttatgattataccatcagttcagttcagttcagtcactcagtcgtgtccgactctttgcgaccccatgaaccacagcacgccaggcctccctgtccatcaccaactcctggagttcacccaaactcatgttcattgagtcggtgatgccatccagccatctcatcctctgtcatccccttctcctcccgcccccaatccctcccagcatcagagtcttttccaatgagtcaactcttcacatgaggtggccaaagtattggagtttcagcctcagcatcagtccttccaatgaacacccaggactggtctcctttaggttggactggttggatctccttgcagtccaagggactctcaagagtcttctccaacaccacagttcaaaagcatcagttcttcagcgctcagctttcttcatagtccaactctcacatccatacgtgaccaccggaaaaaccatagccttgactagacggacctttgttggcaaaataatatctctgctttttaatatgctatctaagttggtcataactttccttccaaggagtaagcatcttttaatttcctggctgaaatcaccatctgcagtgattttggagcccaaaaaaataaagtctgatactgtttccagtgtttccccatctatttcccatgaagtgatgggaccagatgccatgatcttcattttctgaatgttgagctttaagccaactttttcactctcctctttcactttcatcaagaggctcttcagttcctcttcactttctgccataagggtggtgtcatctgcatatctgaggttattgatatttctcactccaatcttgattccagcttgtgcttcttccagctcagcgtttctcatgatgtactctgcatataaattaaataagcagggtgagaatattcagccttgacatactccttttcctatttggaaccagtctgttgttccatgtccagttctaactgttgcttcctgacctgcatataggcttctcaagaggcaggtcaagtggtctcatattcccatctctttcagaattttccacagtttattgtgatccacacagttgaaggctttggcatagtcaataaagcagaaatagatgtttttctggaactctcttgctttttccgtgatccagcggatgttggcaatttgacctctggttctgctgccttttctaaaaccagcttgaacatctggaagttcactgttcacgtattgctgaagcctggcttgcagaattttgagcattactttattagcatgtgagatgagtgcaattgtgtggtagtttgagcattctttggcattgcctttctttgggattggaatgaaaactgaccttttccagtcctgtggccactgctgagttttccaaatttgctggcatattgagtgcagcactttcccagcatcatcttttaggattagaaatagctcagctggaattccgtcacctccactagctttgttcatagtgatgctttctaaggcctacttgacttcacattccaggatgtctggctctaggtgagtgatcacaccatcatggttatctgggtcatgaagatcttttttgtatagttcttctgtgtattcttgccacctcttcttaatatcttctgcttctgttaggtccataccatttctgtcctttatggagcccatctttgcatgaaatgttcccttggtatctctaattttcttgaagagatccctagtcttccctattctgttgttttccactattttcttgcattgatcgctgaagattataccatagaggcgaccaatagattcaaaggcttagatctggtcgacagagtgcctgaagaactatggacagaggttcataacattgtacaggaggcagggaccaaaaccatctgaaagaaaaagaaatgcaagaaggcaaagtggttgtctgaggaagccgtacaaatagctgataaacaaagagaagcaaaagtcaagggagaaaggaaaagatacccaactgagtgcagagttcaagagaatagcaaggagagataagaaggcctccttaagtgaacagtgcaaagaaagaggaaaacaatagaatggcaaagactagaaatctctaagagaattggagatatgaagggaaaatttcatgcaaagatgggcacgataatggacaaaaacggtaaagacctaatacaagcagaagagattaagaagaggtggcaagagttttgttgtttttgttcagtctctcagccatgtccaactctttgcaaccccatgaactacagcacgccaggcttccctgtccttcactatctcctggagtaggctcaaaatcatgtccattgagtctgtgataccatccaaccgtctcatcctctgtcatccccttctcttcctgccttcaatcttttccagcatcagactcttttctaatgagtcagctcttcccatcaggtggccaaagtattagaggttcagctttagcatcagctcaaaagcatcaattcttcagcgctcagccttctttatagtccaacactcacatccatacatgactactggaaaaccatagctttgactatacagacctttgctggcaaagtgatgtctgctttttaatatgctgtctagtttggccatagcttttcttccaagaagcaagaatcttttaatttcaaggctgcagtcactgtctgcagtgattttggagcccaagaaaataaagtttgtcgctgttcccattgtttcctcatctatttcccatgaagtgatgggactggatgccatgatcttagttttttgaatgttgaattttaagccagctttttcactcccctctttcaccttcattaagaggctctttagttcttctttgctttctgccataagggtggtgtcatctgcatatctgaggttgttgatatttctcccagcaatcttgattccagcttgtggttcatccagcctggcattttgtttgatgtactctgcatacaagttaaataagcagggtaacaatatacagccttgacttactcctttcccaattggaaccagtctgttgctccttgaccagttctaactgttgcttcttgacctgcatatagatttctgaagaggcaagtaaagtgtctggtattcccatctctttcagaattttccagtttgttgtgatccacacagtcaaaggctttagtgtagtcaatgaagcagaagttgatgtttttctggaactctcttgctttttttatgatccaacagatgatgacaatttgatctctggttcctctgccttttctaaatccagcttgaacatctggaagctctcagttcacatactgttgaagcctagcttggagaattttgagcattactttgctagcatgtgagatgggtgcagttgtgtggtagtttgaacattctttgggattagaatgaaaactgatcttttccagtcctgtgtccactgctgagttttccaaatttgctggcatattgagtgcagtgctttcacagcatcatgttttaggatttgaaacagttcagctggaattccatcaccttcactctttgtttgtactgatgcttcctaaggctcacttgatttcacactccaggatgtctggctctagatgagtgatcacaccatcatagttatttgggtcattaagatctcttttgttcttctgtgaattcttgctgcctcttcttagtatcttctgcttctgttgggtgcatactgcttctgtcctttattgtgctcatctttgcatggaatgttcctttggtatctctaactttcttgaagagatctctagtctttgccattctattgttttcctctatttctttgcactgttcactttagaagactttcttatctctccttgctattctttggaactctgcattcagatgagtatgtctttccttttctcctttgccttttacttgttttgtcaggtatgcataagtcctcctcagacaaccgttttggccttttgcatttctttttcttggggatggttttgattaccacctcctatacaatgtcacgaacttccatccatagttcttcaggcattctgcctatcagatcgaatcccttgaatctatttgtcacttctactgtataatggtaagggatttgattataggtcatatttgaatggcctagtggttttccctactttcttcagtttaagtctgaattttgcaataaggagttcatgatctgagccacattcacctcccagtcttgtttttgctgactgtatagagcttctccatcttcggctgcaaagaatataatcaatctgattttggtgttgaccatcgggtgttttccatgtgtagagtcatcctttgtgttgttggaagaggtgagaatacactgaagaaatatacaaaaaagttattttcttactgactaggataaccacaatggggtggtcactcacctagagccagacatcctggagtgctaagtcaagtgggccttaggaagcataactacaaacaaagatagtggaggtgatggaattccagctgaactatttcaaatcctaaaagatgatgctgttaaagtgctgcactcaatatgccagcaaatttggaaaactcagcagtgacctcaggactgaaaaatatcagtttctactccaatcccagagaagggcaatgccaaagaattttcaaactacagtacattacataaaatgattctaataatagttaaacaggaagcaatgagcttttctcagtattgatgtgaaagcaggtagtttggaatttaaaagtaactgttgactcaaatagttaatgtttatctgttcccttaacttccatagtttctcagggaaggccaattttaaaatgtattttccttttcattataaatacttcaaggaggaaaaactaaaaacaatttaaaaatttagttcctcattcctggcatagtgatttggtatttctacatatttcaaagtgatccttacagtaagtctagttaccatctgtcagtatacaaagatattacgtagcttttgactgtatatattccccactctgtatttcttacctgtgacccacttactttgcaactggaagttcatacgtcttgatctcctttacccattctttcctcagtattttctctaaccagtagtaagaaagaattgaatgtgatctgagccagccttcataatgttggctagtattttgctgaggaatttttgcatctatgttcatcagtgatattggtctgtaattttcttattttgtgagatatctttgtctgattttgatatcaggatgatgatggtggcctcatacaacaaagttgggagtgttcctccctctgcaattttttgaaagagtttgagaaggtacagtgttagctgttctctaaatgtttgatagaatttgcctgtgaagccatctggtcatggacttttatttgttagaagattttaaattatggtttcaatttcattacatatgattggtctgctaatattttctaaggcttcctggttcagtcttggaaggttgtacctttctagaatttatccatttctttcaggttgtccaatttattggcatatagttgcttctagtcggagaaggcaatggcaccccactccagtactcttgcctggaaaatcccatagatggaggagcctggtgggctgcagtccatgggatcgcgaagagtcggacacgactgagcgacttcactttcacttttcactttcacgcattggagaaggaaatggcaacccactccagtgttcttgcctggagaatcccagggacgggggagcctggtgggctgccgtctatggggtcgcacagagtcggacacgactgaagcgacttagcagcagcagcagcagttgcttctagtagtctcttatgatcctttgtatttctatggtgtcagttgtgatttctgctttttcattattaattttattgatttgtgtcctctccctttttctcttgaagaattaatctggctaaagatttatcaattttgtttatcttctcaaagaaccaatttctgcttttatttatcattgttattgttttcttcacttctatttcatttctttctaatctgatcttaatgattttttcccctcctactggctttggattttctttgttcttcttcctctggttgcttttggtgttgtattgtttatttgtgatttctcttgcttcttgaggcatgaatgaattgctatgaacttccctcttagaatttgctgtgtcccataggtttgggatcatcatctttttattgtcatttgtttctatgtcattttttattttctctttaatttcttcagtgatctcttggttatttagcagtggactctttagcctccgtgtgtttgtgggtttttacagttttttttttttctcctgtaattgatttctaatctcatagtgttgtggtcagaaaagatgcttagtataatttcaattttcttaaatgtactgaggcttgatttgtgactcaagatgtggtctatcctggagaatattccgtgtgcacttgagaagaaagtgtattctgctgctttcaggtggaatgtcctataaatatcaattaaatctatctagtctattgtgtcatgtaaagcttgtgtttccttatttttttctgcctggatgatctgtcccttgctgtaaatgggatgttaaaatcccctactattattgggtcactgtcaacttccccttgtatgtctgttagcatttgtgttatgcattgaggtgttcctatgttgggtgcataaatatttgtaattgttttatcttcttcttgtatcgatcccgtaatcattatgtagtctccttccttatctcctacaataggtttttagaggatttacttctttctttctttctgactgtgctgggtgttgctgccgtgcaggtcttcctctcgttgtggtgagcaggggctagtctccttccttatctcctacaataggtttttagaggatttacttctttctttctgactgtgctgggttttgctgccgtgcagctcttcctctcgttgtggtgagcaggggctagtcttccttgccgtgtgcaggcttctcactgctgtggcttctcttgctgctgccctcaggctctaaggcgtgcaggcttcagcacttatggtgtgtgggctcagttgttgcagttcccgggctctagagcacaggctcaatcgttggggtgcatgggctgagttgctctgtggtttgtggcatcctcccagaccagaaatcaaacccatatcttctgcactgacagcgggactctaccgctgagccaccgaggaagcccaggagtttttaaagtctattttgtctgatatgagtattgctactccagctttcttttgatttccatttgcatggaatattttttccaacccttcgctttcattctgtatgtgtccctaggtctgaagtgaatctcttgtaggcagcatatacatgggacttgtttttttattcattcagctagtctgtgtcttttggttggagcatttaatccacttacatttgaagtaattattgatatgtattttcctattaccattttcttaattgatttgggtctgtttttgtgagtctttttcttctcttgtgtttcctgccttgagaaattcccttggcatttgtttcaaggctggtttgatggtactgaattctgttagtctttgcttgtctggctcagatggtaaagtgtctgcctgccatgggggagacctgggttcgatccctgggttgggaagatctcctggagaaggaaacggcagcccactccagtactcttgcctggagaatcccacggacggaggagcctggtgggcccctgtccatggggtggcagagtcggacacaactgagcaacttcactttcacagcttttgatttccccatcaaagtcaaatgagattctttctaggtagagtaatcttggttgtagatttttccctttcatcactttaaatatatcctaccacttccttctggcctgcagagtttcttctgaaaatcagctgatagccttatggggattcagttgtatgttattttttgcttttcacttgcttttaatactttttctttgtatttaatgtttattagtttgattaacatgtgtcttggatgtttcccattgggtttatactgtgtgggattctctgcacttcctgtacttgggtgggtatccctttcccatattaggcaagttttttactgtaattccttcaaacattttctcagacctctttctcttcttcttcttctgggaccccctataatttgaatgtttgtgagtttaatactgtcctcaattctttttgttcttttttagttattcttttccttggcattctctctcttccagctcacttattattttttctcactgttactcaactgttgattccttgtagaatatttttgacttcagttgttgtgttgttcatcactgtttgtttattctttagttcttctaggtcattattaaatgctcttgcattttctccattctgttttcgagattttggaatatctttgctatcatttctctaaattctttttcagatagagtgtgtatttcctcttcatttatttgatcttgtagatttttaccctggtccttcacctgtaagatatctttttgttttctcaatttttgttttaattgacaggtgggactgttcctgttttactagttgtttggaactagaggtttagagcagtggagtttataggcagttgagtagagccaggtcctggtgttgagatgtggacctttgggagacctcaatgcaattaatattccctgagacctaacagtctctgttagtccagtgattctgactcgttgctccaaccacaggagctcaggcctgatctccggcccatgaactgagatcccacaagccacagagtatggtgaaagaaaaaaaaagaagcagagcaataacaaagaataaaaaataaaataaatttagaaactaacagatgttttagaaaaaataagaatatatgcgaaacaacaactggaaggtaaaaagaagaaaaaggcagaagccttggttgggggtgcggggcttaggcagaacagggcttaggttggggtggggtctaagctcaagacccacacctctggaaaaggccctgggtggaagtacagggtggtgtccaggcttcagttcagttcagttgctcagtcgtgtccgactctttgcgaccccatgaatagcagcacgccaggcctccctgtccatcaccaactcccagagttcactcaaactcatgttcattgagtcggtgatgccatccagccatctcatcctctgtcgtccccttctcctcctgcccccaatccctcccagcatcagggtcttttccaatgagtcagctcttctcatgaggtggccaaagtattggagtttcagctttagcattattccttccaaagaacacccaggactgatctcctttaggatggactggttggatctctttgcagtccaagggactctcaagagtcttctccaacaccacagttcaaaagcatcaattgtttggtgctcagctttcttcacagtccaaatttcacatccatacatgaccaccagaaaaaccatagccttgactagacggacctttgttggcaaagtaatgtctctgctttttatatgctatctaggttggtcataactttccttccaaggagtaagcatcttttaatttcatggctgcaatcaccatctgcagtgattttggagccccccaaaataaagtctgacactgtttccagtgtttccccatctatttcccatgaagtgatggggccagatgctatgatcttagttttctgaatgttgagctttaagccaactttttcggtctcctctttcactttcatcaagaggctttttagttcctcttcactttctgccataagggtggtgtcatctgcatatctgaggttactgatatttctcccggcaatcttgattccagcttgtgcttcttccagctcagcgtttctcatgatgtactctgtatataagtttaataagcagggtgacaatattcagccttgatgtactccttttcctatttggaaccagtctgttgttccatgtccagttctaactgttgcttcctgacctgcatataggcttctcaagagacaggtcaggtggtctggtattcccatctctttcagaacttttcacagtttattgtgatccacacagtcaaaggctttggcatagtcaataaagcagaaatagatgtttttctggaattctcttgctttttccgtgatccagtggatgttggcaatttgatctctggttcctctgccttttctaaaaccaacttgaacatctggaagttcacggttcacgtattgctgaagcctggcttggagaattttgagcattactttactagcgtgtgagatgagtgcaattgtgcggtcgtttgagcattctttggcattgcctttctttgggattggaatgaaaactgaccttttccagtcctgtggccactgctgagttttccaaatttgctggcatattgagtgcagcattttcacagcatcatcttttaggatttgaaacagctcaactggaattccatcacctccactagccttgttcgtagtgatgctttctaaggcccatttaccttcacattccaggatgtctggctctaggtgagtgatcacaccatcatgattatctgggtcatgaagatcttttttgtacagttcttctgtgtattcttgccacctcttcttaatatcttctgcttctgttaggtccataccatttctgtcctttatggagcccatctttgcatgaaatgttcccttggtatctctagtccaggcttagcacatcccagaacagagtgtataagatcaggcccgggaccctaggaggcttcccagggttgagtgggtggggaactccaggtgcttccctcatcctccaaccctggagtttcccttcctgtccccttgatccccaggagttagggtaaggatacttctccgggcatacaaaaccctcccctcccaagctacccctcaggtgtcctggtcctgtgaggtcttgcttctcctgccccctgctccccccaaactcctgcccagttgcttggggattcttcccttctacctgggcatctgaggtccctcaccagaatctattaaatgtcctggctgtggggaggcatggactcttggtcttccttccctgtcatcttatctccatccttctgtctctatcttttgatagtttgattaaaatgtcttagtgtggagctgtctatgcttatccaacttgaagcttgttgagcttcttgggagtatctggaatcttcaagtctttttaaaatcaagtttggaattcttggccattatttccttaaatatattctttctgctcctttctctctattgtcttcttctgggactttcataatatgtctgttgctgcatttgatggtatctcacaaatctgttcacttttcttctttttccttccttctcttcagactgtataatttgagttgaattgtctacaggttcattggttctttttttaaaattctttcttttttttttaaattatggaagtatgatgacacattcacaggagacttggaaaatacagaacaaagttacatacagttctgctatgcattacaattattttttaattagataaattaagatttttggttggagtttcaataaaaaactctcaaaaattaatagaatggatatacagaaaagtagaagcgtatagtccagtgaccctgaaaagcaccacagggtcactgattctttgttctgcctgctcagctctggtgttggaaacttcaagtgagcattttgtttcattagtgtacttttcagctccacaaattttatttgggtgctatttataatgtctgtctctttattgattttctctcttttttgagacatttttcttctggtttcctctatctctttgagaatatttaggacaattaatttagagtgattgtctacagttttcaatatttgtgcttcctcagagacagtttctgttaatttagttttctttctcctatggatggtccatacgttcttgtttctttgcatgcctagtaattttttttgtggaaacatgtaccttctgaatattattgtatcaatattatcataactcaggaaattagattctttttcctctttagggttggttcttgttgttgctatgggttgttattgtatgtttgttcagtaacttttctaaactatgtttaattactgtattctacattatatattgttctcggaaatctctgtttctttagcttagagtcagctaatgatttggcagagatttccttaatatcctggaataacaagaaaaacccgcccactctgccattttgctgatactcctgtgtatcatcttttgagacctagcctcagaggctgtgcagtcccacgttctgttggttgaggtagacacaaagacctccccacccccagattctaggatagcgacacatcccacccttgatggcacatcaaggtcacattagaaaacgggacatccccggatgtggccgcctctggaacataccatccactctaggatgggccaacagagatttgatggctgagatgggtccccagaggccatagctgagcatgctgtcagtagctagactaggccacggaagacctaaggagacagtgatgccacaggaaggccgctaggatggagatacggcgggtcacgtaagcaaagatctgctgggggctcctgctgtagtcccaaggctgttggtgataggctggccaaggccacgtgcctctgccacacacccgctttcccatctttgtacagggcagccccatccttctgctactttgacttccttatgattcctctctatcacaaatgcaatcagcaatgccttcagatccaatcctgaatccagccatctcccaccaagcccagacaccctgacagcctgtatgatcagagtggctcctatacagctgctcagtgacatttgcaatgtccctaaggccaaaagagctgtgtcaagcacactccccccccacataggccccccagggcacccagctcccttgaactctctggccccgctgcctcttttccctcctcccgttcgtctttcctgtgctcctctccatcccactggcctcttggctgcttcccaaacacggaggacagttctagctccacctctgctcttgcagctcccctgccattgctcttttctctgcttctgtatgatttccctgtccatttccctctgcctccttctaaatgtcaccttgtctccacatcacatagccccatgctggcctctctccccatcacctggcgtcacatcctgcttctcactgtcctaagtcctttaccatcacatccatcagcctccccatgagtactgtgaggcccaccccagctgccctctctgtcttaccagcacatggccactacctttgggaggaacaaatggccctgctcagccctggtagctggaatgcagaggaaggaagaacaaaagatgtctgggaggaagacataccaggccctgagactgctggcgtgcatgtgcacagaggtcctgagagtgccactgagcattgcattgacggcaggtggggctcgatggtgtttgttcaggggccagggctgcttgacatcaggcagtcatggtcacacccctccagcttggcccatgtcctctagagtcaggaaggggcaggggagagtcacaccgggtgaccttgaccagcaagtcagctcacttcctggagcgttagcgtccccatctataaaatgggagagtaattgccactcagccaacttcatggagccactggctggggtaattacacagcaggtcctgtggggatggccactgctgtgagcgggagaagttagggccgctgggtgatgtgacacatcgagagtgggggcgtgtgcgtgagtgtgtgtgtgcatataagtatgtgtgattctgtgtgtgtgtgcatgcatataagtatgtgtgattgtgtgtgtgtgcatatatgtgtgattgtgtgtgtgcatgcatataagtgtgtgtgattgtgtgtgtgtgcatataagtatgtgtgattgtgtgtgtgcatgcatataagtatgtgtgattgtgtgtgtgtgcatataaatatgtgtgattgtgtgtgtgcatgcatataagcatgtgtgattgtgtgtgtgtgcatatgtgtgtgattgtgtgtgtgtgcatgcatataagtatgtgtgattgtgtgtgtgcatataaatatgtgtgattgtgtgtgtgcatgcatataagtacgtgtgattgtgtgtgtgtgtgcatataagtatgtgtgattgtgtgtgtgcatatacatgtggagtcatgtgtgcgtgtgtgtatacgcagaagtgtgtatgtgttcacatttgtgcatgtgcaaagttgtgtgtagtgtgtgtgattccaatcccaaagaaagtcagttgccaaagaatgctcaaactaccacatgattgcactcatctcacatgctggcaaagtaatgctcaaagatctccaagccaggcttcagcaatacatgaactgtgaactccctgatgctctagctggttttaggaaaggcagaggaaccagagatcaaattaccaacatccgctggatcatggaaaaagcaagagagttccagaaaaacatctacatctgctttattgactatgccaaagccttcaactgtatggatcacaacaaactggaaaattctgaaagagatgggaataccagaccacctgacctgcctcttaagaaatctgtatgcaggtcaggaagcaacagttagaactggacatggaataacagactggttccaaatagagaaaggagtacatcaaggctgtatattgtcaccctgcttatttaacttatatacagagtacatcatgagaaacgctgggctggaagaagcacaggctggaatcaagattgccgggagaaatatcaataacctcagatatgcaaatgacaccactgttatggcagaaagcaaagaagaagtaaagagcctcttgatgaaagtgaaagaagagagtgaaaaagttgcttaaaactcaacattcagaaaacgaagatcatggcatctggtcccatcacttcatggcaaatggatggggaaacactggaaacagtggcagactttatttacttgggctccaaaatcactgcagacagtgattgcagccgtgaaattaaaagattcttgctccttggaagaaaagctatgaccaacctagacagcatgttaaaaagcagagacattactttgccagtaaaggtccacctaatcaaagctatggtttttccagtagtcatgtatgcatgtgagagttggactgtaaaaaaagctgagtgccaaagaattgatgcttttgaactgtggtgctggagaagactcttgagagtcccttggactgcaaggagatccagccagtccatcctagaggagatcagtcctgggtgttcattggaaggaatgatgctgaagctgaagctccaatctttggccacctgatgcaaagaactgcctcaatggaaaagaccctgatgctgggaaagattgaaggcgggaggagaaagggatgacagaggatgagatggttgggtgacgtcaccgactccacggacgtgagtttgagtgaactccgggagttggtgatggacagggaggcctggtgtgctacagctcgtggggttgcagaatcggacacgactgagcgactggactgaactgtgtgcgtgcatttacgtgcgtgtgtgtggtgtgcggtgtgtgtgtggtgcaggggtttatgctgtgccaaggtcagcggtgttgtggtgcagcaaggtatggtcatcaatgtcaccgtgcccaggagggtccagacaggagtgtggtgccatctgggttcctggctccagaacctaatgcggatgcctgaggttcccactcccccatgtaagaagaaacatcaggggtttcgggaagaaggcagaagcctgtcccacctggaaaggctgtcatcctggaggtggaggaaggctgtaccaggtggggtcaggctctactagcagccagagaaggaagagtgggtttatttctgggctctattctaccccattggttcacatgtctgtcctctgcctaggccacattgtcttgatatctgcagccctgcaatgagtttgaaaacagggaagtgtgagtccaactttgtcagcttttccaagtttgtttcaactcttcagggccccttatttggcttttaagatcagctagtcaattcctgggggaaaaaaacttgcttttttagaggttacactgaatctgcagatcacttagaggaatattgccagcttagcagtttttaagtcttctgatccaagaatatagaatgtcttcatttatttaggtctttgctatgctatgctatgctaagtcacttcagtcgtgtccgactctttgcgaccccatagacggcagcccaccaggctcccccgtccctgggattctccaggcaagaacactggagtgggttgccatttccttctccagtgcatgaaagagaaaagtgagagtgaagtcgctcagtcgtgtccaactcttagcgaccccatggactgtggcccaccaggctcctccatccatgggattttccaggcaagaggactggagtgggtgccattgccttctccatttaggtctttaatgtctttgaatgacattttgcagctcatagcctacaaatcttatatttcttttgtcagatttattcctaagtgttttttttttaatggtattataaatggaattgttttcttaatctcatttttgcattgctcattgctggtgtatagcaataaggttgattttcagatattgacctcttgaactctatggttgattttcaaatatagatctcatactctatgatgaaagtttatcaattctaatagacgtttcattcattacttagaattttcatgtcatttgctaatagagacagtttcctccaatctggaccctttttatttatctatgtttttcttggtcagtcgccctggctggagcctgcaggacaatgttgaaaagcagtgagaagagcaggcgctcctgatttcctcctgatcttggaggaacagctttcagggcccattgtgttcttaaaatttaaaaatctaggtatgagaactacccttcacaaaaacaaatagataaaagggggagagttttgatagaacacgtctcaattctttgaatattttctcagttatgtatgccaaaaatctcacagtgatgtattgatacagtgatatatcaaaacatttttttaaatttgtcagctcatcattctattgggtcctctttcattctgaaacaagaaattggaaacgcctgatttacacaggtcttggtgtcccagtctttatagctgacatcagggctggacatggaccgggaaaactgggggcgttttcatgggtcaagtgggagatgggtggtcctggaagggaaggccaaagaagaagcagtgatgcaggcaagaatgacagtcaggatgccttggaatgacccatgccatcctataggccctggcctgacccctagggacatgtgaacctgccttggagacctttggggcacagcatcaccctcagtggcctacaggccttgtcccttttttgcacattcagacaaaggatcctgtcatgctcaaccccaaactgcaatcttccagccatgatcaaacacacaagcacctaagcaggacagctgtggtgacagtcaggaccctaactcccttctgtgttacccacaccagggtgccacagcacccatgccctctccctggtgacttttccaagcctgcattgtagatggacctaccctcagagctgcctgcacatgctgcttcccgggccccacagtccgaagtgggatccgtctttgtggccccgttgttgcagcctccatcctctccagatcagttttctctttagctctgggcccatagggcccacctaggggacccctcccatcctccagggcagctcctagtttcctgactccatcctcaacatcactctcccaggacaagagctgagccctgcagggtgttctccagtctggtgtgggcccccctgccgtgcacagtaggttcacatggcaggtacatagggcagtaccaaggtttgctctggcacagaatggttacttcataaggacatgctgagtaaatgactgaaggatgagcacgtaggcttgagggtgcccatgcaggcagacttccctggggagcgggaacctaagctagatcttaaagagctttctttttatttaaaacatgtatacagtgcttttgaagccatgtgttagagtgctttacacacagcagtaaattgaatcctaacacccatctcatgagccagcactatggttataagttaaggaaactgagatacaaagaatgggctgggccaggactcctaagagagcaccagcctgtgggaggttgggggttctgtagaggctgttcaggtgagagcaaccctgaaggcgcccagggcctgcatcaaggagcagagaggcaccagcttcagggctggaggcccagggagctccccctcctttgcactccctcgaaaggctctcagagactctctagtctccagcagacctccaggaccctcgggtgggctctccccccccacccttcccgagcccactctcacctctcgtctctccctcatgtccactgtcccccgcgttccccgcttcacgttctccgccccatctccgtgctcctccctttgccctttcctccctcttccccctcctcccctcagtctctctccctcttcctgcctccattttcagggggtgaaagtcacctcagctccattcgccctcatcacttggtctaacgggaaagggaagacctctctcccccgttgctcgccacggggctgagaaatggccggatgcattgtggcgcagagctgaatggcccaggaggaaggagcctgccaggggccccagagagaggccagctctgggaggccattgtggaggcccccgcctgcccacccggacacactcacagtaatcaatctgattggattagggtcagggcgaccctaatcgtgtcagaggtcactcgggctttgtggcagggtccatggggcatttgcccacccctgctgaggcggcctagttgaacaaagcttaacactgccagctgaggagtggggcccagccccatgtggaggtgtgtgagtgtgtgcgtgtgtgagcatgtgtgtgggggtgaggataagagggaaaaagtgtgttcatgtgtcctgcttccagcatgctcactctctctctctgtctgtatctctctctcatacacacacccacacaccactatctgcctgcctggcctgggactgaagactggttggccaggtggacccctgagaggctgccaccaaggagcgtgaggttgggcagcagaggcgagcctgggcttggaagaagtaccctccactctcatttgcacagtagcaggacaatttaacctgcactgggcagaaagcatttgaagaattttgagtgcgtggaggctggcacacgatgcagcttatctgtccctcctggacacctggagcaccagctttccctgagagctggccgacacccactcttgacctccaatgaggtgaagggaggggaagccaaaaggcagggaaggcaggtcccagacgtcagcgctttcgcagacactctggaggaagccccgccgggaccacgcccctcaggaagtgagatggctggtccaaggtccaggccagtgggtttgtgggtggcacatactttgaggggtctgtgtcacagctaggtggagcatttgcaccttagagaaatgaaggggagcagtaaggaggtgactcatccacggtgggaagcaggacccttgatgtctctcccactggtgtcccagcacgtcagcatgaacaggtggggcatgggccccagtttcatcatcgatgacccctaagaagctgggcctcagcctgggtccatcactagtttagtgcccttgggatagtgtccttgccagtggctttcgcaggcacccccaagccagggcctccgaggcttccctagtgaagagactggaggagccgctcaaccctgcctctgattccagactgtgtgcctctaagggtcccttcggggtctcaggacctggaggacacagtgcctgaacgtctgcactctggcggggcatcctcattggcagagggggcctcgctgctggtagaggtgggccagtcttcacctgagtcctcacccactggacctcacccacgggacagctgacttgggggccctggctgaccccttcaaaacacatcatgtcagaatcctggttggttatttgaggtatattctgtggtgtcggtcaaagtctcagtaagtgtgttctgggtgcctgaggcctgctctggctccccaggccctgcttacccccttgcagccctctgcctatgcccttgggcagccctgggccaggcagccacatctgcctccctctacccccttttccttgtgaggctgggctggagagagccagagggggatggcacagcctgtcctcccccaggcagagccccttcccttggccaggctccagggggtggtctgtccacctccctgtgtgtcctggcccgatcctcggagggtcggagtgcaggcacggggccagggcaggatggccgggccggcaccaaccacggggctcaggaggggccagagagaaggggggccctccagagaaccagcatccctgaatccaggttgcaacccctgacccccatcggaaagtgtttcggttcacggtggttggggggctccgaccgtctctgcggccgcccctgtatatcattaactctccccagttgggggtgtgtgtaaaggggccaggagagaccccggtgacaccctgccgagcccggctcagaaaacaatatccccacgaagacgacaagattaagcacaagaggaaagtgaaaatgctgctggcgattcacacgccctcaggagtgctgtgttaaagcgtgtgaatagtgagctcccctcgtgccccaggcccctgggccgcgcatacctcccggttgctatgactggcttgctatggcctaatcgccgacgagggggaaattcatataaaatatcgagggccattgtgggcctaacgcggcgtgacagtggctcacaaagccagattcattagccccagcaggtaatcaggacgccggccgtgctggcggccgggcagtgtcaggggccgctgctacagtggggcgcaagccgcattccgctctcaggtggttccatcctttgtgcgggacgggccaacaggattaccaaatgccattgcccattgcgacaccccctcctagccaccccgccagctctgagaccaaggacggtgggctgtgtgggaagggggcagactgcaggctaggggttcttgccagtcttccgtctctcctttcctcgtgttggagcattgctacggggaagaggtaacaacctctgaatgctctgaaagtgctcttgaggccttcgtgggccagggagacagacacagagcatttgctggcctctctgcacctgcacaggcactgtaggacttgcttgtctttgcagggggttggttatccctggacctgcctctctgcatccctcccttcctacagcctctcacctgccaggtacgtagaggcccgagtctggccagggaggcctggagggagccacggtcgctgcctctgagtgtgtgctggggatgtggcagagtgagggcgctgagttctttctatgtcttgccagggatgctctggaggcaggtgggaacagagaaatgcccccacagaagctcccatggaggctcagtgtccacaggagccatttgtcccaagcaggcatctctgcaggcctctccaactgtgagcaccagcacgtgccacaaagaactccttgcctgcaaccccggggaagacccaaaggacccctagctgagtaagggcaagcctgtgggatgggggaatttgcctcacacagctggtgagagagaagcttccctgcagcgtagtagagtggtggggcgagagtccagggctccccaccctgagcaggcgactgtggttgcagccatggtcctggcagggggagggggtctgcatggaggcaaggaagcctgcctcctacctgcacctcttctgctgatccactccagcatcaagacaggaggtctgaccccgaagtcaacattgcccatggaagaagcagagccccaggtctcaagggaccacaggggaggcacgcccaggtgagagagggccgtctctcaggccagaactcagccaggaggctttgacaggcaggtcttacagctctaaaggagcagtcacatcctaccctgccccaggctgagaccccacccagctaccagatgatagcagtcaagccccagggacccagggcctcacttcacatggaagccaggccagaaatgcgtagcccactgcaggagcctggagtaagagggagtaggtgacaccctccatattagccctttccatgcccctccaagggcagggcgtgtcagagacaccctcgccatgggaaaccctctccctttagaaccctgtcctgggacctcctttccaggtgcctcttgggtctggccaccttcctgaggagggccttaggaatctgagaccataatggagcttgagttcagctcaggaatgtatcagaatcaccaaaggattcttcacagatatacatgccccctcccagaactgcagccttgggtccactggtaggtctgcagtgaccactgctggggtatctagttacctgcagagcttttcaaagggtgcattgtgtggatcccacagacagaatgccccaggagcttgatttcattggtcagtggtcaaatttgaaccacagtccccttccaggaacttccactgcctgagaggttacactcattcctcagaaaagggatctacggccccttcaggccaatgggaccgtcccaggagccctaggccatcccctccttctcatccaggaccagccccccacagccttcccctcccaggagaggactggagggtctctccccatgcccagtggccacaaagtatggggccagcctagcagggcaggtgggtcctccacctcctgaaagccacagctatggggacagcccggtggtcatgaagcccatggctagggggtcgcaggagcttctgctgggctcagtgcccatggctgggcagcatggggcccgggctgactgccctggggctctacacccctctggggctgagagggcctgagggacccattatggtggctcagcagagaagagccccctctttttgtctggaccagttataaaaggatgtgcaaagcctagggcagggaggcctctgggtggtgctttcctatcaatccttgataaaagggccttctgggtaatctcccagatggaaaatcatctctgggacagaggccgcagtcttcttgtccactcagaccacagtcaacacttaataagtagttgctaaccactggggaaatgttaaagacaaggaccttggaatatttttttgaactttcttcagcatataggactttggaaataaatcctttttttgatgtaaaacaaaggtccttttctgaaattatgcttgtcatttcttatgtatcttattctctcaaaaaagtaacaaaatttcacagtcctatgtcagtccccaagtaatttttagtactttccaagcctatgaaatccaaatctggaaacaggatttattagaatccctctagagtttagcactagagttctaaagttctgagactttagaagtaaagtaaagtaaccgccaaagcccatctcacatgtgactcttgaccctggttcccaaggctgcactggtctcagtgatggtgcagccgtgccagacaactctcgctgcatgtccctcccctactcccacccaccaggactgcaagctcttacaacatagtaacctgccccagcctttacctctgcccatgcctccatccaccgttcatccatccatccatcaatccatcattcagccatcacccacccactgtccaccacccactcattcatccacccagtctccaccatccacccattcatccatccatccaccctccattcattcagccacccctccatcccaaacctgccccagagcttacattgccaagcctattgtgtgtcctttccccccactctcttcatcataaactgtaatctcccagaggcaggtgacacagcacagcccaaagcaaagaacctgacttgcaatagcagggcctcccactaaaggaatgcaaagattcctctggttcaccctcctcctctccagtgcaaggcttccctccacctaacagtaggtcattcagtgtatgcttaattaccgccagaacaggtagctccttccactttcagaaagtctaagttgttagaaattccatcagagcagcaatccactttctcacagatttcttactttggttcttgagaatgggcaccttgcatcttacttatcttgtatatctagttgtgagcctagtgtatggctcattataggctctcaggtcctagatgggtggatgactatgttgatagatggatgatgggtggtgaatgaatgaatggatggatgatggatggatggatagatagatggtggagggatggtagatgaacagatggatggatgggttgattctggatggacggattgtggataaatgaaaaaagggtagctcatcgatcctttgaatgaactgactaaataattgctaatgaaacaattattaccagttaggaacaaaaagcctcttgatgaggtgaaggaagagagagaaaaggccagcttaaagctaaatattagaaaactaagatcatggcatctggccctattacttaacagcaaatagaaggggaagaggtggaagtagtgatgtatttcctattcttgggctcgaaaatcactgagaatggtggctgcagccgtgaaatcagaagatgatcacttcttggcaggagagctataacaaatctagacagtatgttggaaagcagagacattactctgccgacaaaggtccatatagtcaaggctatggtctttccagtggttacatacagttgtgagagctggaccataaagaaggcagagcaccaaataattggtgccttcaaactgtagtgttagagaagactcccgagagtcccttgaacagcaaggagaacaaaccagtcaatcttaagggaaatcaagcctgaatactcgttagatgctgaagctccagtgttttggtcatctgatgcaaatagccaactcattggaaaagtccctgatgctggaaaagattgaggacagaaggagaagagggcgtcagagaatgagatggctggatggcatcaccgatgcaatggccatgaacttggacaaacttcaggagacggtgagggacgggggggcctgatgtgctgcagtacatggggtcgcaaagagtcggacacaactgggctactgaacaacaatgaaaaaatatcaagcttctggggaagatggttttcttgatgggagacacttgtctcacaaaaagactcttttaggagattccctttcttcttccttttcccaatctgagattgcagtgtgggaatgagagtcctgagctggcacagagcaggcttgagaagccctaacagctcatgtaggctctgttctagcaacgcacccctctcttgtaggctgtgtcccttccttctctcttgacctgccatagcccattcaaaagaaagcattttgctggtgacggggatatttccagtctcatctccaagaagcaatttctctacccacaggcagaatggttctctctccctatctgtgtgtgtctgctgtttgtggctaagatgttgctgaaacctgagtcactgctgtgccctcccagcccatgaccacaggagagtcctgtgccccttcctctctaagccgagactactccagaaggtcatggctttcttggttcaaacctctgtggaaatttgataaaaaaaacagtctatccagaaaacacacaagttttcagacatgccctggaattcagctcatgatttggggagggttatgttctggactttgttggtatgttactgttacatattgacaagaactttaggttgaaagacttctgtaagtctacaataaacctcgttttaggggtagagtaaatgaacatgtgggcttccctggtagctcagcggtatagaacctgcctgccaaagcagaagactcaggtttgatccctgggtcaagaagatcccctgaagaaggaaatggcaacccactccggtgtgcttgcttggagaatcccatagacagaggagcctggcaggctacagtccatggggtcacaaagagtcggacacgactgagcgactaaaacaacgaacaacaatgaacaccctaaagcttacctatggtttcctgggttaaaagccccacagctgtgggatggcatctgggcattctgggggtctcatgcacagcatcagaatgtgttttaacttttcctttggaaataattgtgtagacttacagaaacgttgcaggaatccagatctcctcccaggcctctcccttgctgacacgacacaaatccagctagatccatcaaaaccaagatctgtcacgactaactaaactctagggtttacccagatttcatctacttctccactaatgtcccttatctgtccaggatcccaccccaggtccatgggctcctcagcccagcccttgcccttcgtgcccttgaaaccaggaggaatttggttaggtctttgagggtgtctgatgtttcctgatgattagatctttaaaatgcctcaaagagggtggaatttccttgggacatcgtcctaggaggcacatggcatccatccatctgttttctgtcccgttgctggtgatggcaaccccgatttctctggtgaggagggacctgttatagttccccaatgcaaagtttcaggttttctctttgtgactgatcagcttctctggtaactgcttaaagacatgtgtcttcaattttaaaaggattttcgttgccagaaagacccatcttactatttttttttttttttttttttgcttatggtcttcgtaaggcttcttttcctcatgagcaatttgaaggccagctccaaggggtccttggtcctccgatctttatttgtgaggagcccctcccctcgtttgacagaaaaggaaactgaggtacccagaggagagagaagtgtgcaggctcacacagctagttggtgacagagcagggcaagaatgagttttttcctctaagttcaagggggaacacccctcccaatccctgcacagccttcccctcaagttgtctggaagccctggactgtttgcctgagcttgataagcggagatctccaagccctgtgcagggcagggcaaagccccaggcccgccttctctccccttatctcagtagctggagaggggaggtgaacaggggttaatagagggtgcagagcagaggcagagaccggaggcaggatcctcctacagggctcgccctgggccctctggggacaggctcagaaggacctgggggagcgtatttaggactcggagactctgagccttgagaagggccaccagagagccgcgtggtaggggaggcatcaggctgtgtgcagtgggtttcgggaatgcccaggacatactggctctaccctgccctgggaggggtggttaggaacccccagacctccagctcacagcccctaacccagagtcactgcatgggcaggaggggagacaccagaccaggaccctggaggggtgagaatcaggtgagcccagcctccaaagagttggaggtgagggacaacctgaatccttgagaagacaaaataagggtgggggctctgctgagtggaagaacaggaaggaagggggtctgtggccatgtcatgtgtgccttgagtcagcaggaagtggctccaggccgccctgaaactaatcaggtttattataaaaggataacaggacgggggcttcgtgtcttcagaggcctggctgatgtctgggaaagaggatggtgaggcaagctgtcctgaatttgttccaggacaagctgagtagggaggggcagagagccaggtcccctggggtgcgcctgtccaggtgtgctcagaccctcctggactccttgtcccagcccaaggcctctgccctctcctctgaccagtccctcgctcaccaataaccatctgtggggcgggcctggggctacagattagaaacaaaaggtgaacaccacacagcccccacttcagggagctttcaggcagaatgggtgtgagacggtcctcctgaagtcctcggggagccctagggctccagggccaggtgtggactgagcccaggctgcatccttggatccccaaagagcagggacggggacacagcagacgcacagcagcagagaagcagctggaaagaacccaagggaaggacgagggctgagtgtggctggaggccagggagcggtgatcagggctgagagggtagcaggtggagcagagtcagcctctgtatgagccaggcaaggacacagtggcaaggcctggaggaggggcttggcagggccagatgggctctggataaagcattcctcctacagtatgtatcgggggatgtacatacttgtgtgagtgtgcacatatgtgtgtgtctgtgtgtacatgcatatacgggtatgaggtgagagtgtctctatgtgtggatggggtgcggggaagctggaagctggagccgcctgtcccaactaggatcctcttctggtgcaagtgggagattctaaggtctggactcatggtttgagaacaaggagaggcaagatgggccacggccatttccggaggccagagcagccttcagacttgggtagatcccaacaaagctgtcagtgggaggctgatggggagaaatggggaatccttccgggtttgtgactgagtgcttgcctgggagtttccagaaagaagcaggtgtccaggcctgctctggggaatacatgaggagtacataggtgggctgtgatctgcagaggaccatccagaagtgttggcaaatccatagaaagaagtcaccaaaagcacagtggagccttgcagctatcaagcggcctggtgcctagggagctttctcagacacatcccaccctgtgtgttcctagtgtaggagtaaatgtgcttttctcagtggcaggtgtgtgtgtatgtgtacaaagctgtgtggctgagtctgagtgtgtgcacactgctggctggaaccctatcttaccacttccctgactctgctgcctgattttgggacacatatccttggctgcaaacctgggagcgggtaagaccatgcagttggaggaagtgtgcggtgcaaccccaaacctctgcttgctccccagggtggagccccctctccatccccctcccaggaaaaaagcctcctgagcattgatgtggggtgaggaggtagcagccccctgggatgactctcctgtagccatttcgagcccttgcacggtccaggcctgctgtggggcctctgcccaggaagagctcagggagaaagtggggcacataccccttgccagacacagaaggccctggttggtcctgttcctatatctctccagctcactcctcagtccatagcaatttttttacctgggattttaaaattcctgctaatcagcaggtaagctccatgaggttatcccgctccctgatatttctccagcagggtttggcaaacagcaggtgctccacacacatggggaatggtgattggaggagtgagtgagttctatcagttcatgcaggacccagggtacccccgggacctggtcctccacctggagcacatcacggcttggtgccttgaggaaatgtttgcacatactcgggagccatgatgcactgatgcattcatccacactgtctggggaagcctggctgaggatccagcctctgcaaagtccaggctgtcccccacatgccctgcctttccccctggtcctgccagcccagcccctccccacctggggccctacctttgtgagcccccatgcagaataccccctgcctcctgattttcctctgccgactgcctgcctgtcctttgagaccagctcctctagggttctgtctgccagggtgaggcgaggcctcccacacccagaaaccccctgccgctggcctttccaaggcaggcctctgctgactccctcacatgcctgtctgatccagttcagccccactggctttttcttcctaagcgtcagccaccccccactggccttctaaaaacaaatgtcacatcccctgactcagttcctccatgtgtagaaggagaaggcagcattcaggggcccagaagctccaatatcaggtcagaggccgtctgccagttcccgaggggcattcagctccagacccacgcacgaggggccagcacagggtaaagtgcactcggagacgctgaccttcagatggctccagaagagttgtcccttccgctgggcctctcagtacctggtgtctgaagtgggagaagggaagtgtgtgcaggcagtgaaagagacacaacgggcagcatgtgagccaggagccgcaccctgggcagggccgctggaagcttccaacaaggacgtctgggcagaagggctccaccatggtttaggaggacactagaaggagtatctgcctttttaatcaatccacataattattttgagattcatccatcctgtctttcctggcatgccaagtagaattccacttcataaatatgccacaggttttaattgaaatataattgacatataacattataattagtttaggtgtccaaaatagtgaggggcttccctgggggctcagatggtaaagcatctgcctgtaatgcaggagaccctgagtcaatccctgagtcgggaagatcccctggagaagggaagggttacccaccccagtattcttgtcccatagacagaggaggctggtgggctacagtccatggggttgtaaagagtcagacacgactcagtgactaacactcctactactacaattacaacataatgattcagtgtttgtggacactgtgacatgatcaccacaataagtttaattaacatccattacccccacacagttacaagactttttcttatgatgagaacttcaagatctatgttcttaacaatttccaaatatacaatattaattctagttaccatctgtaacccacgacttatttaccttatgccactatttttcatccattcacctgttgatagacattttagaactcagtttaggactatcacaaataaagttgcagtgacatttgcttcatggtcttcacatgaacacaggttttctccagggttagtactttatggggtaggtatatgttttcaagaagcggccaaatagacttccaagcaggaagcaccggtttccttccagccagcagtctacagcgttctgatttctctacatcctcaccagcactggttatgatctgactttctggtttcaaccgtccccgcggttctccataagtgatgcccagaatcttgccttggctccttaactctccgtgtactttctttggggaagctctctcccctccttgggtccttactcagggacgcacgctcctgtcccaccgcagccccgcctccccttcactgtaccccggttaccgcgctgcgagtcttagcaccccacgcccactgtgggtgcccagggcccagcctgggaagaggcagccacgccccccacggccagcccctcccagccaagccgggtgctgccaagcaagtcatctcttttcgcagctactcgggagtccgccttcgtgcacgccatcgcctctgccggcgtagccttcgcggtgacgcgctcttgcgccgagggctccgctgccatctgcggctgcagcggccgccatcagggctcgcccggtgagggctggaagtggggcggctgcagcgaggacatcgagttcggcgggatggtgtctcgggagttcgcagatgcgcgggagaaccgcccagacgctcgctccgcgatgaaccgccacaacaatgaggctgggcgccaggtatgtttgtggcccccttcagtcctgggggtgaagcagaaatccctgagaccacacccctgcagggctctgggaaacagaagctttctgagcaggatgtgtgccctgccctctgaggggtgtggcccgctggaggccgggtggtgggccatgggagggatgtctctgatggccagacagggggtctgctcacctcctgcccaggagtgtctgaaacacagggctgtcccgctgctccacgaggtctagggcattctcacagtatggcaggtctgcctgtgacgttgaggtcacaaggaaggagggacgggagaaaggcctgctcctgcacattcccggagggagacagccgggctgctacaccacagtgtggtaagttctccaatgaagaaatgcgcgcgcgcgcgcgcacacacacacacacacacacacacacacacacacacatcgcaaggtgatctgggcgtagtggagaggtcagacccagactggagtctcaaaaaagacttctactaactgaggtggtgagtggagacaagcagaatccttggcagacagggaagcctggcatgctgcaatccctggggtcccaaagagtcggaccgattgagtgactgaactgaactgaagtgagatgaggggaagccaggaaagcattgggtaacccatagtgaaagaatgcacaggggttagttcaggcagaatatggagaacagagaaagaaagatgtggggaatggagaagctgccagagagcaagttgtaaaaggctttgtgagccttttcgaacagaacttgattagagggtcaggggtagctgctgataggaagtgatgtgtgtaggggctggaaaatgtccagtagagttggctctgaccttggccaatgaaactggggcattgcagagggctgaagagtgaacattttaatttccaacagcagggaccttggtgactcacattactcttccaactaaagacaagtacaaatgtaggatgaaactaaaaagcaccattcacaagtatagaatactcacctgatacagtcacctgacttatcacaggcaagaagacagtgcagtgccaaaggggaaatggtcttttcaataaaggatgctcagttagttggataacaatatggtaaaaaattaatcttgacccctacttcacaccatatttaaaaacatcaattctccatttccaaacaggaaaaagtaaacagagaatgtttagaagaaaatctctttgggaacttggagtaggcaaagagttcctaaacggccaaaaaagcactcataatgaaagaaaaatgtgataatgcagagtgtattaaaatgtataaaaccgcaccaccatgaaactgaaaaggcaatccatacaggaggagagattcacaatatatacactcaacctgtatattaaagttatagtataagaagaactctacaaactaataagaaagactgataacccaatagaaagttggctaaaatatggaaagccacttcacaaaagaaaatctagaaatgaccaatatgtgtgaatatgtgaaaaggtgatcaatatcactagtcatcaaggaaatgctgttggaatacatgccctggcaggaaagaagataacaactagaagagagcatgatggaggtttccgaagagctgtgttctgaggctggtcatttgtgaaatttggtcatatttcatgcttatgacatataaacttttgcatgtatactacacttccaaaaaaataattgttaagtgtcaaatagctagccatatagtgaggaattagcagtccaaagttcagagggcgactatagcctccaagccaggtacttggggctgcttttatccaggggtcatttgctggtctgtgaaaaaagtatatatgctgagctgcactttcagcagcctcactgagctaaaagggaccgtcagaggttctatgtctgggaaataattcctcagtttaggcgggatcctgaggagtaaaagaaaacctgaagtagacaagcccttgtgcacatgtgcaggctagtaaaatctcaaacctggattaaggtgatcccaaattgctggtatccccatgcacctggaaaaagaagacaaaaatcttttttggagaatgataaccttatgataggctgatatttttttctacaaacaatttttcaaacacagtgttcaacacatgatcaaatataacctatcaaatgagctggtgacagaatgagtgataaccagccaaacaaaacaaagcaaaacaagaacagcaacaaaacagaaacaagagtccaatactgaaattattagacacagattatgagaaaaaaaatatgcttacttatgttcacaaagctaaaatgtaatgtaatgtaatagatttgggaaagaatcacaaagaaactgtagacctgaaaactgaatgggagcttccagtttaaaaaaatgacaaactaaatacgaaggatttttgtctgcagtcccctagaacatcactaaaatgacaataaattgattttaagatacataactaaactatagagaacatgcaaaacagaaggggacaaaggcaataaaactttgaaagcagaaagcaatacctcagtacagtcaagaaagctgaatcttaagccattagaagctcttaaactagatcggctttactctaaagccagtcttaaagcaatcaacaggaatttctagtattcgatatcttgagaagtagaaatagatatagggcttggaaacagaaagattggttgaaatctattttaaaagcacttttaaacctactagctcttctgtccaacctcttgcatccagacaacacccctccatcaccatggcagaagcctggaggcttattccctaacgagggtaaagcagaagatgtctggactgctgagggtgaggctgcccagatgagaggagtctgtctatatatacatttctcttcttaatctcctagtgccacagcaactcttgtatgctccaggcgggagaatgaaagattctcccctgaaaatcagaccaatccaagagaagagacttgaagacactgatgtggggtttcccctaaaagcaacgtcgccagatcactctacagtgagggtccaagaacatgagtctctcctgtgtacagcaggttccaataagtttttggtgccctacttttaaatacagcaggtagttagggatcactgaacatgatgccttcctgcaaccacaacgataaagaccaaaataaataaacaaaaaccaaacttacaggaaagagacattatagagatgaaaacttcaaaaaaccatcattatccccagagagttaatacagtgaatccataaaactggaataaactgttaacttaaaagaatattcggggggggcggggaaggaggctcttagaaattaaaatagaacagcaaaaaaatcttagcagaaaggttggaagacagttgagacagccttcccacaaagtagaggaagagagacaaaaaccgggaaaataggaaagattagaaaatatagaagatctgtgcaagaaagacaatgatgaacgtgaagatgaggaagtttggtaaagaagtaatacaagaagtttcccagagctgacgaccagacgttcagaccaaacaggccgtgtaagtgattggcacgagaaaggggaagacccatgtccaagctcattgtgagggctttcttggcggtgcagtggttgagtccgcctgccagtgcaagggacatgggttcaacgcctggtctgggaggattccacgtgcagcacaactaggcccacgcgccacggctgctaagcctgtgctctagagcccctgggctgtgacaagagaagccaccacagtgacaaagtccacacgtgtcagtgaagagtagcccccactcacagcaacgaagacccagcacagccgaaaataaaaatttaaaaagaaagcttattgtgaaatccacagcctatgacacagagaagccttccaaacttcccagaaaaaggtttgatttcatgcaaaggatcaggaatcaaaatatcatcagtgttttctaagaacgacagtgaaagctaggataaaacagagcaatactttcagaatcctgaaagggggaaatattttaagccaaaacttttatacccagctaaatcatcttttcaacttttcaagtagaaaagatttgtttgcagacatgcacacttcacaaaatttaccaaaagggctttgaaaaagatgtctccaagaaaatgaaatccatggaacatctggtgtgtttcaaagtcttgaagagaatatttgcatgactagagagtgtatgagactgaatctgtaagtatgttaaaaacagcaacaacaaaacattttgtagggaaaaaaaaggcaatcacatcatgtggctcaaccaagtatgacatttaacaaagccccaacattgtcagcttccctggtgtctcagctggtaaagaatctgcctgcaatgcaggcgaccccagtttgattcctgggtggggaagatccgctggagaagggataggctacccactcccgtattcttgaggttccctggtggctcagctggtaaagaatccacttgcaatgccagagacctgtgttcaatccctgggttgggaagatcccctggagaagggaaaggctacccactctggtattctggcctggagagttccatggactgtacagtccatggggtcacaaagaatcagacacaagtgagcgtctttcattttcaacactgtcagcaccaagttttgatctaactggaactatgctatagtttttagagtagggagggagtttggaaaaactgtgtatcagagttgtggcataggtgcccccatgggacctccatggtgataggtctattagacaaggccaaacactgaaaaatcaagaagtaacaagtgaaagtgttagtcgctcagttgtgtccaactgtttgcaatcccatggactgtagcccaccagattcctctgtccatgggattctccaggcaaggatactagagtaggcagccattcccttctccaggggatcttcccgacctagggatcaaacctggatcaagacaagcatcttattagaggtgcagaggtgccaggtgctgcccctagcaggtcaggaaagtactgttaatgagagtgtgggagcagaactcctgtttttcttaacaagtcttaggaactcttggactctttaaagtatatgcatatataattttgatcaaaagcaagactaaaacaaaagacttaggaggcagagatgggaagtggcagctcctctttggaagtttggtaaaaaggagaagaaaatggagattagacagaactggactttggtgagggaatgtaatttacagatgcccctaaaaaagtgccaggatgagaaggaagtcttgaagaaacagcaaggagaggggaacagggtggaggaaacatctggacagagagcccacctgaagtcttagaccagcattgttcaatatagaagtgtaatgaaaaccacacagtatgtatcaatttctagtagccacattttaaaaggaaacaggtgaaatttgttttaaataataaaattgtattgagcccaatataaccaacatgttaccatgacagtaatgcaatcaatattaaaattttgaatgaggtattttacatcctcttatgaaatctggggacttagtgtgacccagcatgtagtgtgcccttaacagcacttctcagtttggaccaccagccgcatctcgtgacctcacaggtggctatttctgattacatcacaggacctttcacccccagccccactccttcccccaaagagagaagggaagagatcctgctgctggggtgcccacaggagaaacataatgtaattctcagcactcccctacaatgcaataaacccagtttcctgggccctgaagatactgtgctcaagccactcccattattcacgatcaggccagcccccaggcttgccacccagcccgtgtgcatttcctctagaccaaagtcttggatttccccagttagaaggaaccatttccctttcccacccctgcagttacatgtcacgttacagccccttcactgaacagagatggcctagaagtagactcagcccaggagggggcttcccagaccattccctccaggatcttgggtctgccaggggaaccacatcaaggatagcattgggagagggtgtctgctccgcctgggagtcccagagctttatggagcaggttgagggatcgtttgacagtggaaggaagactaaggcaaggagcacggccatcctccggggaggtggggaggttgagggcctgccccgaccccaccgcttgcccgctcctgtaggccatcgccagtcacatgcgcctcaagtgcaagtgccatgggctctcgggcagctgcgaagtgaagacctgctggtggtcgcagcctgacttccgcgccattggtgacttcctcaaggataagtatgacagcgcctcagagatggtggtggagaagcaccgcgagtcgcgcggctgggtggagaccctgcggccacgctacacctacttcaaggtgcccacagagcgcgacctggtctactacgaggcctcgcccaacttctgtgagcccaaccccgagacgggatctttcggcacgcgagaccgcacctgcaacgtgagctcgcacggcatagacggctgcgacctgctgtgctgcggccgcggccacaacgcgcgcaccgagcagcggagggagaagtgccactgcgtcttccactggtgctgctacgtgagctgccaggagtgcgcgcgcgtctacgacgtgcacacctgcaagtagagggcgtcgctgtcggcgcccgcgggttagagctccacctggcgggggcggggcccctccgtgggcggggctggaggcggggctctgaggtagcgctccccccgtgggcggggcggaggcggggctctgaggtagcgctcccccgtgggcggggcggaggcggggctctgaggtagcgctcccccgtgggcggggcggaggcggggctctgaggtagccttcccccgtaggcggggcggaggcggggctctgaggtagagcccctccgtgggcggggcggaggcggggctctgaggtagagctccctcgtgggcggggctggggcggggctctgaggtagcgctcctccgagggcggggcggggcggagcgggggcgggggcggggctctgaggtagctctcctggagcggggcggggtcctttatggtaggacagggttgaggctcctgagtggcataaagttcttccccggcctagagtgaaacccaggacccttcct

SEQ ID NO: 221 - DNA, 186607 bp, Hippotragus leucophaeus
  source 1..186607: mol_type = genomic DNA
attgacatttgggggaaaagtcacagttttaccaggcttcttgctgctttttttttttaaacaaatgagaaatgttatgttctgacctgagaatttaaagctactgaattacacctaactaaactaagagaaattctctttgaaacatctggatcgtcctcccatacaatacatgctagcatttggaaatcagtccagctgaggtgcaatttgctttcttgagagtttttggcttgaaacaagttccaagggaacttgtgagatttgtttttccttttccacattttagcatatattacaagcgcattcaaccatttgtatcagttctgtccattacataccatcctatattgccagcatatcaatatgggaacaacaatcctgagtcaatcatttggtactgtaatttttgggttagagaagctttggaactgcagttaaaagtcttatttttttttaattttttttttttttttaagcacgggatcctgtcttcacccctacacactgaacatatccattcggatgctattgaaattaccatctaggccagaagcaggcttagctttcacttccaaagaattatctaagtcttctagcttctggctcagctcactgtcagactcatctgaacaactttctgtgggtagtgaggtttgaacccctgaggtgctgcacaaacttgaggtaaccgttgaaggcaaggaaagggaaggaggagaagaaggggaagaagcagctctcctggcagatgcttggaaaaggatattaggccaggacttcatggagaagcaagagagatgaggataggtgttattagaagaagctgcagactgcgaggtagatgtggtgttagggttaggggagcagactgagtgaggtaataatctaacatgctctttggcatttctcattgcttgtttgattgttttctctttgtgcaagcttgactggaggtgttggctaagtgcttcattcccaccgatggccacatcacaggcgagacactgatatctgctgaccgggacgcgaagcactgtctcttgtgggtcaatcaaaggctgaccgaaataacagaaggacttttgatggtttactgcggcgtcttcatcagtaaacatcatctggcactttctgcatataaactcatacttgacgaatggaacaacgtaagtgtctgaaaagtctgcacttttggactctaactggggttcttcttttgtgctttctgtggcgggactcttgtctcccttggtttccgaagcgtcgctggggttcggcggcagcggctcgctctccgctttggaggtcttcgtctgcagggctttctgctgctgctcctgctgctgcttctgctgtctctgcagggaatcctgcaggctctgctggtactgttggtactgctgcaacagggtccccggggacagccccgccagggtctgcggcatggtggggccgtagggaaagaggctctccatgccgcaaacgggcggcaggtagcctccttgcacagcgccgggaagctgaggggtgaaataggaagcaaagccagggataaagtacggcaagaactgtccgcccaggaaggatgcggggtcgccggcgatcgcgttctgtaaagcctgcagctgagaagggtccacaggcgtgtcgcctacgactttgcccaacactgaaagagcagacgagattttttcctcttttttggggtgtttttccggttttgtggcctcgagttcctcctctttgatttttttgaccttgtttggcttcgttggctttttctcagagtctttgttctgcggctcggtctgctgtcctgacagagagggtggtggtggtggtggaggcggaagagggggtggcggaggtgctggagtctgcagcagaggtttggtgggggcgctgctgagagacagggcaggagacgaagtagctgaagtaggaaacccaagcatgcctgcacccggcggtgttaacgctgcaaaaggataacagagagacgcccactgtcagtgcccagagccacacggatgctcaatccctagacagccctcgaaaacattattaacacgcaccaggaattgtcaagagcaccgagcttttgtgttcctctccttttccctagtttcaaacccccacagttaactctcagaaatggaatctacacacttgtgtgtgttagtccctcagtcatgtccaattcttcgcaaccccacggactgtagcatggctgtccacggaattctccaggcaagaatactggagtgggtatccgttcccttctccaggagaatcttcccaatccaggcatggaacccagggctcctgcactgcaggcacattctttaccactgtctgagccaccagggaagccctctacatagttgaacaagattttactcagaaaacaaaacgctcgacagtgggctaggaaaaaagaaaaaaaaaaaaaggacaacctggtgaattgttgggtccttctaactgatacactttgcaagacccctccttcattttaaccaatttttcctatacctctgggaaggtagacccacttgtccttcactggagcagtctgacaattaccacattcactaaaaataatcagctatcaataaaaaatgaatttcatttgtttttttctgcctaacttctgatagaaaaatacctttgcatcggataaagaaggcagtagttaatgcctgctgaagataccaaaaaacaactagcagtgacatcagagctcttcttcactaggactgagcgtggttaggcctgatttcattgttaagggtacagggtaagctactcattactccctattctgacactttggccaacagtacttgataggaattgcatgtgttaacacacagctttatcactgacccctccacccatcccacccccaccccccaacagccaaacatgcttcttccaggtttacttgtagcaggcataaatgattctcatatcattagagaaggagaactaaatgctcagtaggcagacacatgtgaggtagagtgtgacttgaaatggagatctttgctggatttcaagcatgcagtctaatgtagtggctggtaaaagcctatcacaaagccatttttaggctctggatagttgggtgaaaaactaagacagttcaaggtagaaatggaaactgtaaagtctgtgcctttcctgagtctgtttttttagaggcaaatacagttagttggttgcaagaggaacagactggaagcctaattgggttgtggtttgctcttcaatgaaggaaggctcactaccaaatgatccagacaaggaccatgatggaggtctgatgggctgatggaagaaataactaggagaaggtgaatgaagtttcaatgtgtagctgtggggaaaactctttttaaaatattggctagtcttctatgctaaatgcaacatttgggtgttaaaaaaatgaaaaataactgacacaaaaagtgacacacatttctttagttagaaaaagaactttagttttttaattggcctttacccagctgagaaactttgtctaaggcttagcattcaagatactctcaagtcctcaacatcactctcaacttgaccccaatcattatcatattactgtcaattagcctagcttattactggttgctcttcttttcaacctcaccacacccaatttttctctgacctgctttgaaatcatttctgtagttgtattattaacagtatctaaggaatttccattatgttagggaatagtcttccaatatcttcagtggtaagtggctgctgctactgctgctaagtcgcttcagtcgtgtccgactctgtgcgaccccatagatggcagcccaccaggctcccccgtccctgggattctccaggcaagaacactgcttcctgaacaatgactgaggcctgtgtgggcttcccaggtagctcagtggtaaagaatctgccttccaagcaagagacacgggtttgatccctgtgctgggaagatcccctggaggaggaaatggcaacccactccagtattcttgcctgagaaatctcatggacagaggggtccagcaggctacagtccacaaggttgcagaacagtaagacatgacttagtgattaaacaaaaacatgtttaggatcactacttactattacttttttttttaaataaaatgaattactttctgctaaaaaattaattcagaagaattaatccctgattcatagtttcaggcatgagtgatttgagtggaagaagctttatggaggacagaagatccttccttgtactgttagaatgatgttaggttggtagccagcctcttttgcctactcataatgccaatattagttttggatcaagaacatcttggcctcatactcaataattatccccctactgcctaagtgctttcccccctaaatctaaggaaagtgctggcttacctatctctctgacatgagaatttaagacaagagaaattttaaggaactaagactttaaaaaatcgcagtggtagttagaaagcaagtagatcaatatttgttgactcaggctttcctatcagatggggtctacaaattcttgtctagaggtcatataacaaagtaatgaaaatttttagaagactgccgtaggaatcttaactactatagtcaaagactatcagggatttttagaaattcaacatcttgaggaataagctgagttaaacaactagctaagtaaaattttaagtaaacgagatacagataagaaaaatgaataatgtacattaggtctactactaaaagacatacacttgtagatgttcataaccaaaaattcagtagtcaactgatgtatgaaaaccagatttagaagagaaaaactgaacaccaatcacgatgcaccagtggtgttaaatagggttttcctggtggctcagcgggaaagagtcctcctgctaatgcaggagatgtaagttccatccctgagttgggaagaattcccgggtgaaggacaaggcaacccactccagtattgttgcctggaaaatcccatggacagaaaagcctggtggactacagtccatggggtcacacataacttagcgactaacaacaacagctacacaacatacattctttcctgttccctaactcctggtccgattatctgagagatgaaagttttcctgcagatgatctcatattactgtgatttggtttagttttgttttcccaaaactgctagagtgtattggttgctcagttgtatccgactctttgtgaccccaagaactgtaactgaccaggctcctctgtccatgtgatcttccaggcaagaatactggagtgggtacctatttccttctctgggcatcttccggacccaaggatcaaacccaggtctcctgcactgcaggtggattctttaccatctgagcctccagtaaagtctgaaactgctgtctatgcccccaaagtaatgctttttggaagaaaatgcctgtctccccatgaacatagcacagatttagtgcttttcctccaatttgctttgacctaggtctcgcagaggaaaactttattcttgaggtgaaaaattaacactaatgatgtacatgggccaaagacaattgtgctaaaattattaaagacttactcttatctagatttacccccaaaatgctagtatattacactgaggtatgacaaaaatgcaaaaggcatgttctaaagttccatttaagggaaccgggttagtcagtatttccagagactaatggaacatataaaaatcagacacataaaaagaatcagacactgcttaaaacaataaagtaaatacattaaaaatagaaaatcaagttattttcctattcttcttgaggaaaaatccaaaagaagctaacctcctaaaggataaaatgagaaagttttctaattttttccaggtgtacaggcatatgattttccattaccattttccctttttgcatatgatcatgatagaaaaagacaaatgtggaaaaattttgtagcagaaaataattcattttgttaaaaaaaagaagtaatagtaagtagtgatcctaaacatgtttttgtttagtcactaagtcatgtctaactgttctgcaaccttgtggactgtagcctgctggacccctctgtccatgagatttctcaggcaagaatactggagtgggttgccatttcctcctccagtggatcttcccagcacagggatcaaacccaggtctcctgcttggcaggcagattctttaccactgagccacctgggaagcccgatattgaacacaggcctcagtcactgttcaggaagcaggctcacatgatagatattactcttcaaagggtcttccttgtgatcttgaaagaccaaacaatttggaaattaagatgaaaaagttttatgagaattaatgctgctaaaacaataagaattccatccaaaaaagaacaaaatgggtatttaaaaccaggaaatttggaggttaaatattagtcgctcagccgtctccaactttttgcgactccatggactagcttgccaggctcctctgtccattttgagcctttaaattctaaacctctggttggccgattgtttctttatttagattttaaggtgaatgacctggggctatttgtttccatcaacctgattgcgaatctggaggttgataaatgctgtagtgttggagaagactcttgagagtcccttggactgcagggagatccaaccagtccattctgaaggagatcagccctgggtattctttggaaggaatgatgctaaagctgaaactccagtactttggccacctcatgcgaagagtcgactcattggaaaagactttaatgctgggagggattgggggcaggaagagaaggggacgacagaggatgagatggctggatggtatcactgacttgatggacctgagtttgagtaaattctgggagttggtgatggacagggaggcctggcgtgctgcgattcatggggttgcaaagagttggacatgactgagcgactgaactgaactgaaatgctaaaactgaatatgtacatttcaattaagtcagtttgagggtgcagcctttgcaatcagacttattacttattttatggctgatctcattcaatggatcactttttagtgattttcttaggaacaaaatcttaaaatgggcccaaggtaaacacaccatattatcaaaatttattcatatagataataaactgttagaaaagcccagagcatgtgagagatataggaatattctacttatgaagtaattttcttcttttatttcatctagctggtatacctatttcttccacaaagcataggagatacttgtttgatgaaatgtaatccagtagaaagatgctgatagcaagatggagagcaacagctctactccatgacataattaaaatattcagtattacccatcacagatcaattaacctaaaaaagctgtgagctggaagtgtgggaattcaggctctcagatggaatcttgctggtaactgtgctgtgctaatgtttaaactccatcaaaacaaacaactaattcaagagagactgcaaattccaataggtatgttcatgcaccttttctcgatataacactctcgtctgttttggtccatgatttaattatacagcagatacagggtgcctttggtacatgatgcatttaaaaacttcagctgcatgtaacaaattctggtaaattctcttttcatttttattgaattttctaatttttccttgttatggctacttagatacacccatcatttaaaagttgacatttaatttccaaattcatggtatttttaatgcacctttgatattaatttcccactttgatattaatttctcatttaaatgctttcgtctctgcaatcaccctctgtgttttttgagtcttgtaactttattgagactttcaatggctaagtcaaagattttccttggtaaattgtacttgaaaatatgtgggttattttcaaatctttttatattgacttctaacataattccacagtgataagagaacagactctatgattttaatacctttagaccatgaaatttttgtacttgttttatatccctggatatgttccagtgtctcctagtttacagtctgctgctgccgctgctgctaagtcacttcagttgtgtctgactctgtgcaaccccatagatggcagcccagcaggctcccctgtccctgggcttttccaggcaagaacactggggcgggttgccatttccttctccaatgcatgaaagtgaaaagtgaaaatgaagatgcttagtcatgtctgactcttagcgaccccatggactgcagcctaccaggctcctccatccatgggattgtccaggcaagagtactggagcgggttgccgttgccttctccgagtttgtagtctatgggaacttgaatagaatttgtatcctactgttgtgtgaaaattgtataaatcctaattatgttgaactggttcgtggtgcttttcaggtctactatatcctcctacttttctgtatattcagtctattaatttttgagagtttgatattgaaacatcaactaaaaatcttagtttagctacttgaaataattgtaatgtatagtggaactatatataactttattctgtattttccaagtctcttgtaaatgtgttatattttcataattaaaaaaagagagagagaaaaaaaataaaaaaacagtgctcatcaagaagggcctgcctctaacatctttccacaactctgatagttttgccaatccatatttcagaaggagaatgtaaattatatttatggtggtagaatgaggagaaaggttaggtttttaaagtatttcaaaaacatattctctcctctccttcctggctttctcttgtacaggccctctgggtactagtttcagagtgacaaacgggaaaggcagtcagtaaaggacacattgtctaagcaaaggccttctgatctggtggagagaaaaccaagatgtcctgatcaccacttagagggtgactacacaggaccatccatcaaagctgacttgcagattaaaggcacacgtacttgaactgttcttagcccagtgtaaataccaaattttattctgttttacataattttcaaatttatacgtgttcatggagtttttccacattagacattatgtggaaaagctctattttacataactgatcatagtaggttttccacataagacatttttctagatattagttaataatcacagtgatatataaagtgagactagaagactaatacattcagatgcaaaacaattagccattgcattattctttaactatatttgacttaattgaaaggtacagacaaaatacataattgtagctccaatatttaaggccctaagaatattcagataattaaacccaagtacgttccctacatataggtggatagtggaaggtagctggtgctatagttaaagaaaatgacactgaataaattttctgggtagaattctttgtatttggagattcactctgcttctctctaaagccaacaaatctttctggacaaggatccagctgagatagcagtggccaagaggtcacctgacaccactgtttttatgtctcccaaactaaaaatgggaatattttccaaagtcacattaaaattaaaattgccatcagagaaggacgaaattgaaaggtttgaaatttatgtaaaaagtctaatttggaaaatgaaaaaaaaaaaaaaataagagccttcctatcatgttttggaaacttcccagatgtattagttcattctagatgtctctttggaatgtcataatttccttgtaaaaattaaaaaatatatactgttaatctggaaaacaaaacagtttaaaaagaaactagaatctttttttcttcttagtttgtgtcaggtaccacttttgttatatgtgtggcaacatgaatgcctataaaactgtattcagtttttttcaataactagatacttatagttattcacaaaatctaaactatacaaactgcatttctcttgataagcacagaattggattcaccatctaggagtgcctcaaacagttgtcattttgttctgtcttgattataaatctaggtgacgggtggtggtagaaagatatagagtattattaatatatttttaaggttgtaaatatacttgaacaataagaaataaaatgaatgctactaaaagcaaaattgtacaaattatcatagaagtgaattcttagtaattaaactttacatatctgttttattacctgctaggtataatgcaggggcattcctgtggctagaaggctctttgcttttgaacttcctggcatttaagggggaaaaaaacccaaaagaatacaaaagcaaaaaaaaaaaaaaaattcagtatcccttggaaaaacataaattaagatgccaacgaatgctttaatactttactttcttaatatgtataacaaatttcatgtcacatgtcttcactgaaatgccatttgaaattaattttgaaatgagtctaaaaaaggaatgtttctgagatatgatataaataatatatttatgagatgctaatctacccttttctgcacatatttggggtggtttactgcctgtttattacctatagctactgaactatatatttcaaataacttaatggtttcacttactgaaattaagagatccgatatacccctattcttggttacatgtcattggctgcctaatatcacttaattcattagactgactctccttgacatgacttactgtttgaattttgtggaaatccaggcaaggaggatggaccgttcattccagggagaaggacggggggaggcccgggagtcctgggtaggctgcgggcagactgatgccatggagggagctgctgtccatcatgcttggctgctgtactgctaatcccagcacgtctgaagctttctttatacggtcaagttcttgctgagccatcagctgtctaacggtcgtgggagccaagtaatctttctcccgatcaagctgactcccaacagtctccctcactttggaaatgtgctgtttggagaaaatatgatctctgatggacaagcgggcagagtacttcaccccacagagggtacactctggtttggcgccttccgttccactttgattgatcatgaaaggcttccctatgttaattttaaatttcttttcctttgcccttgcattctggaaccacacctggaccacacgtttgggcagaccaatctcattccctagcatctcacattcttgcatggttggagttcggtagtcactgaagcaagccttgagaaccttgagttggagattgctcatctgggttctgaaacgcttgtgacctggtcggtcgttacttttggatttgaaaggattgctggagccgaatggatttggtgaactggggtcagctatgctagatgtttcactgcggtcggcattgtcatcggggtcatccgtgatataaaagctttggtcgtggtcaccatctttatcactgaaaggtatcgagggacttgtgagcgagaagagaaacttctcatcacagacctctgtggtgggggtggtcgctgtttttggcaaagcgtcgagagttttcccctctttaggagacaaagccggcttcacctctccggaactcccggtggtgctttccatttctgcgtttccctcgtctccggtggtggcgtcactgatcgctgtattaatggacgaagtctcatcaaaatcagttttattttgatcatacccagcctcagcaggaggggcgtttaaattctctacatcctcagaacattccgctttgaaagaagaagggcttaacagattcttcggtgacagttctgccgtcttgctaacaggtgtcgacactgtagaagccaactcattctcactggagagatcgattttcgttaatggcaaagatggataatcaaaataaatgtatttctgcgggctatctccaccatcttcggtggatattaaagggcttggtggcaagctgtaaccagcctgcttgccttcgttccagtgccgggagcgaatgtggctttctaaggctgacttggccttgaacagggctcggcagaaaggacagcgtttatgcgattgtgctggacccacggcccggaactggccctttctttctcgtgctcttgtattctggaaccagacctgcacgacccttttcttcagccccacttctcgcgcgatgtgatcgagcattttccgggtggggttggaatccagtaggtatttttcatagagaatttccagttgctccggagtgatggtggtcctcaggcgcttatcgcggtgttggtcctccccactgttcccgccttccttctcactgcagttctcctccttctcatccagcttcctcttcagggaagcggccacggtggccggggctgtggggtgggaggaagctgtctgtgggggcatctgtgtgagaggaccaccgagcagctgtccggtcatcagggaattgttagggtcgaatatcatgtagggcatgtccatgggccgttccaggaacggggagtgaaggaattggttctgagcagccaggaagtgcatgtgctgatgctcctgccagagttccaaggtagggaaggcaactgtacactgatcacattggtactgaagtaactgtggaggtagactgttctggagagaagtcatggcaatctgcagcggactggaagggacgggggtctgagaagccgagggaggtcgtcccaggagttggggcggtttgggtggctggggctgagcggccgaggccggcggtggcggtggtgggtccgaggaagaagatgctgacggcagggctggtttggtgccttgagggtggggcgaggggtcacccggctttggcttttctgtgggacactcgggctttggagacgtcttttccagttccggtttgggagatgggatcaggggggtgctggtcccagaagcagagcccccagcaggggcaggagcggttttggctgcttcggtctggccaggcactgaacaatgcttatacaccacctgatctgtggcgtccatggagtcttcagtttggctctcatcttgggcgtcatcgtcttcatccttgtaacactgctttttctgatgcgtgatcaagtcgaagatcctggggaaaaccacactgcactttttacactggtattgcatgttgctcgttcggatgtaccgctcatttgtgagttctcttttttcgttgtcttttgtctctgtttgattctcataactcttccgcgccttctgccgagcattctggaaccagacaacaataactcgggtggggagattgagaacagtggaaagttgttcgatttcatcatcttttgggtaagcgttggtgtcaaaaaagtcttgaagaacccgaagctggtagtcagtaaacctggtcctggaagaccttttactgaaggatgtgtctgatttgtagtgttctagggaggagggctgggggtccattctgatatcttccaaaaccgttatgggagggttactgaagttgtagggcgaatccttatttctctgccgctccttaaaaagcgtgtttcgaaaccagtgcttgataaccttctgggagaggccagacttctctgccatttcctggatctgttcttcactcggagaattgttgatgtcgaagtaagccctcaggattttcagttggtcgtctgtaattctcgtcctcgggcgtttgaactgcgagtgcctcaggaagttgggatccaagccaagctgctgctggcagagctgggtgaggtccgccgagagtgtgtccattggaggcagctgcagggcgagctggggcgggagggcgggatgttgcaccgactgcatcatgatggacggaaagaggggaagatccagggatactggcagctggacctgcgggggtgcagaagggggtgggggcgggggaggtggaggagggggcgggggcgggggtgggggtggcgggggagtgggcgctggggcctggagtggggtggagaccgcgctgggcagtttcactggccccagagaaggaggctgcggaggagcgggaggcaagggaggcggtggaggtgggggaggtggcgtttccggagaagatggagaaatgggataaagcttgtcataggcctccctgtactgacgggcaaatttttccagtgctccgtatggaaaaaactggccgtggacatgctcctggtgactctttagaatgagaacattggagaacaacttcccacacgtcccgcattccagcttctccgtgctttcgccttccccactcttgcccttcttctgtaccttctgcctgttctcgttgtactgaatgaccagttcaaaaccaaagttttccagtaaggctttggctgcgtttcctcgggcccctgaagcgatgcggggcggcgggatggatggttccgaggacttcagcttctttccgaggtctttgctttctttgagcccttcgccttcacttacacattcttgctttggcttgtcttgcttctcggccatctcttctgcctccttgtaagagggtacgtccttcacgatggggcagtcggcactggccacggtggtttgctcttgtttcaataacttgctggcctgctgctgctgctgctgttgttgttgctgttgcagctgtggctgcggcttttgagatggcaggtggggctgtgtggcctgatactgttgtgcttgctgctggagaatctggagttgagtttggccaatgtgatgttggctttgtatctgctgcttcaaatcttcaagcagggacccagccattcccgtcatgcccggcatgccaaaggcggcagagcctactggcaagcccagatctggccccaagctgaactccgtcccagggatgtagaagggaaagagaaactgaggctgctgaaactgcagcagagcttctggggtcataggaaaatggggcaaaaaggcagggttgagaaactgaggctgaaagaaggccgcctgctgttgcaattcgtgctgcagctgcatctgaatctgtgctggtgactgcggtgggtgatgtgtaggttgagcagagatcagttctggagtttgctttttatttaattctttggcatctaagtgggtatctttgctgcctactgctgctaaactaatggaatctaacatcccttggctgggactgttaacactggctgccactccatgcccgccaggtgcatgaccaccgctgggctctagcttcgctgccctcgcctttgtctggtggagcacagacctcatgtggatttccaaggtcgagctttggctatacgcaacgttgcagatgctgcacttgtagggtttgttatctgggctgttgttggtttcttgagggacagggctggaggcttcctgcaaaacctttttcaacttgtgcaggtgagatactgagttataatggaccaggagaatgttcttctgggtgaacgactctttacacacggtacacttatatgggcgagatggatcgaggaatttttccatcgtaaaatttggcccttttctaaaaggtaaggtccgctttggttcagagcccatgtcatctggaatagaactactgtcactgcctacaggacttgccttcccttcatggtccacctcatactctctctccatctcctgctctagggcatgctcctcctgggccataggttcactctctgcccatagttccccattcacgggcaaggaggcatacagctgttgaagttcggcttcactcagttcggggtggcctgcttccaagtgtttttttaaagcctggaatgtacggaaactacgctggcacaggttacacatagtggcggcccgaatcgcatgatactgggaatgtatctgaagcttctgcatagtcttaaaagccaagctacagtggttacagcgatacttgtaaacgtggcggtctgagacagagagtggttgccttttctgctgttcacttaactgatcttgcagtgtgtcggagattttcatatccttactgctatttttattccattccgacacttctgtggcttctttagttggtttctgctcctcactctttatttccacactagcctttgaatcatcgagacccgccatacttttgtcatccactggactgtcacctgtgtgaagaaagcataaacagcacttacaggaaggaagtctacagattaaatgccaatgaatattgttatgcaggagcctctgaagggcttccttggtgattcagtcagtaaagaatctgcctgcgaatgcaggagattgagggttcgatctctgggttgggaagaccccctggagaaggaaatggcaacgcattccagtattcatatctagagaatcccatggacaggggatcctggtgagctactgtccatggggtcgcaatgagtcagacacgacttagggactacaccaccaccaccattgtttaggaggaacctccaaagaaatcacctctgacctcaaggaatttcagcatgggaagaaaataagtcagaattagcatgctaccaccagtatgacagcaagggttataagcacagtgttcaagaattagagcccacaaaatattcctggtcagtggtatttaggtcccccctcaatctggtaaagaatttgcctgtcaagaagatcccctggagaagaaaatgaaaacccacttgcctgggaaaccccatggacagaggagcctggtaagccatagtccatggggtcacaaaagagtcagatatgacttagcagctcaacagcaacaataacaacaaagggtcatttacagataaccagatagtaaatatgccttggaaatgacagtttttggaaatgtgtggtttttttttcctttgtgcatctcaaaaacataaaatcttttaccgtaataatgctagatcagcatcatgaatagaaggctcagagtgtgtctggcacagatcctggtcacaggctggcatacctgaatatttcccagccccctcagctgtgatgactgcaggtgtgtcccgctctgacttctcagaggcagctgctggcagtagcaagctgttgggcatcatcacatcagggaccggcacctgtgaaaaccaaaggtgttcatgacaaaggtaccccagacatcatggactccatcacactttaccccagacagttgtgtaccccagttatattttctaaccaaagcagggacattctgtgactcttagaggtcaatgctctcctttcaaatttcagatcagtgctgtggcaatgctgtattctttacttttcttttttaaaaaaataagcttgaaggtttctgtagcccagaactgatagccaagcaaagatgaaactcctagtgcccacaggcatcatttgattaacattataggtatattcaaaagcagagacattactttgccaacaaaggtccatctagtcaaggctatggtttctccagtggtcatatatggatgtgagagttggactgtgaggaaggctgagcaccaaagaattgatgcttttgaactgtggtgttggagaagactcttgagagtcccttggactgcaaggagatccaaccagtccattctaaaggagatcagccctgggtgttctttggaaggaatgatgctaaagctgaaactccagtactttggctacctcatgcgaagagttgacttactggaaaagactcagatgctgggagggattgggggcaggaggagaaggggacaacagaggatgagatggctggatggcatcaccaactcaatggacgtgagtctgagtgaactctgggagctggtgatggacagggaggcctggcgtgctacgattcatggggttggaaagagtcggacacgactgagcgactgaactgattgactgactgataggtatgagaataaggctgcaaattttgtgttgttgaatcagctattcttgtatcacatttggggtttattcccaaggcacaggagaaacaaacgggactttacttgtgatttctacaacatggtcaacaagagcttgtcgccacccagaagaaatacatttctgtcacacaataatgacagattttatgttgataccttcacagagattatggcacacatgcatcaccacttggtacccttactgtcataagcagcttctccacacaatccggagacacactgtgcaaatgcgtcagatgaagctggaggtgcatcttgttgctaaggacgtcctggcagaggggacagcagatgaccggctgcactgagtgctgtgacaggacgtgcatctggatacgactttggtccctactattgtagttacaataaggacactgatagaactggaaaatattgaataaacatgactcctattagttaacggatgttgatgcctttggagcatttgaagtcagaccaagagttaatcaccttgccaattacagtgtctacatacatttcaacagcatggaatggtctgggggctctaaaatgatcaaggcaacaattaaatatatatacatgtttacacagcaaagggagaaaaaaacaaaaaacaaaccatgtgtacctgctcgtgacagaatttattgtcctctgtaggctttgatctttttgttgacacatcctcttcttttgccagcagaagtggctgggttccccctgccacactgacttttagctccttttctggtgtgattactcctgattccccaaaagagaatagaacatctcaatcttaaaagactgacaatatcaaaatcagaaaaatgatgtctttcgcatagctctaagtccactgaatcactaaaaggaggggcaagcacttgtaaatgatgctaatctcagaaggcaaaaacacacttctttttgtccactgaccaagtggactttataaatgtattttaaaatgtacttctgtctcgtgtttagataaccctcagtgaccatgaaagattcatcaatgacacatgccctctgctgtctcaatatacctttatcacattaaagcaaatctattcccattcacaaatgctaacttagaaaataattacttttggaactgtttcattaccttttttttttttctaaaattctgggacactaaaaacacttcaaaattctgagaagggctgaccagttataattcacaaatgaaaccaatgcttttatgtggtaaatataggattttaaaattatacattatgtattcaccactgcttttttgtgatttatccttggctttagatgtttcagcagttggctgtgcatatgacattgtagtccaaatcaagaagacagttgttttatgaggttaatcagaatattcggtgttaaagatggtttaaaattttgccaagatgagcagtgtaatgtatagaagcctcacacacatcaaaagatagagtgtgattctaatttcccaatctaacagaaaattctttccagcatcaattttcccgataatctcctctgtgaggctggatattacagcgacattgggtaggcatgtcacatacatctcacgacaaacacaaaacctcatttaccagccattccaatctcatcatagcacggcatcatctgaccttttttctgctgtttattatgagtatttctaattttaactttcaattttcaccatcttccagtcaatttgcaactaaattatttccagggtgaggacactatcactggacaactgggtgcaaatacatcttgaaatgcaatgaagctaaaccattgattgctatcagaccccgcgtaaatatagagtctaggcgtaatctgattgtatgctgtgcatgaagatttatcttgattttttttttacccaatccacatacggttcatataaatgaacaaattacactttattgcaaaataacccagttttaatttaaaaataaggtcatggatgttatgaaaacaacataaaaatgaaccccaaaatagattctttttctctcctggatggagatgcatgttttataccatataaataattttaggaattttgaattctgaaagaaatttgaaagtaagtctgactctaaggagaccaaaattaaaatagaatttaaatgacataatgacaataatgttattccattgaggtctgtgaaaggtatagaattagtgctacaatttcgtacaaattgcactgagacttatttctactgatagatatacaaacactagattttatttgaattggtacatttgtcttatatatacagatatattagagaaacttagattctttctagatatttgaaaatataatttactatagttacatttgaatgatttaaatcagagataaactaaagaattttatcacactgattaaacaatatccaagtatttaatatccaaagatatctcaaaaccaagaatgtttattttataattaatccaggtatcaaaatgtttttcttctaaaaggaaaattctcaaagcagaatgtattttgtgctattgttttaaaagtattaaaaacaaatacaagaaaacaatgtcatatataaggttggcaaataaaactgactgcttaaggtgatagatcaagttgtataaaatgattgtcatttaaatcagtgagtgtctatcagttgcttttttcctgtgagactggaaaatttttgttttaaaattccctaataatgagggagaatatgcttccttaagagaataatactatgtcatattcccttatcattcttttgtgtacatggtagaatctgacatgatcagtaataggttggtccaattccatatgctatcaaagactgtcacacagaaggtaaaagagaatttccataattcttgttgcttgcaggctttaggaatatcagaaagaataaactttctggaaacttctaaatctattaaatgtatagctatggattacagcttatttttataagcatatatcttctaatgttagtactataaaggatcaaaaaactgatttcaaggcttaaaacattttactaagactgtacattggtataagtatttgatataattaatccatattattttaatgtatattcatattatcaagaatataattgcttttgaatttagggacatttgtgctgcctcaagaaaagagttaagttttatggtcactatttcataaccactgtggtaactgctggatatagtattctaccctatatatatgtcagcttcaatattttttggctaattaagttaattaaaccatgatcttaatgtaagctaggggctccctaaagaccattttattttaaattgagaagaagttataaaatctagaccctcaaactctagctaggcacctcagaaatacatgctactgataagcagcagcagcagagaatgttaagatgcaagagtgtatgacaaaaacagactcttgaagctaaaataggtcatcatgattatttgcaaaaatgagggaccttatattttatgcatgtatgccttttctacaaaaaggggtaccaccttaggtatttactgcctccctggtgaattataggaaatcaaatctggagtctttctctgaattgttttattctagaaatatattaaataaatgctaattacttttaggaaggttttaagttttctgactactcatagtttatgtcttcaactttacttgaaatgaacactgttttgttaccaaaattttgaaatgagatcataattcattttgtgttattaaggccatcacagtatcttcaaaaaacaatgtcattttaatgtacttttaactaaaaaaaaaagaagtctaatttcaaataaatactgccaaatagatgagtcgatgattatctgtcagttatggggttatttaatttgcatgagattgctaatataaaaatgacataattcatttcaattcagatgccgcctacttaataaattttcaatccctaaaatacagaaggttgtaaaatggtttatgttcataacaactaaggaaaatccaataacatatgtattcaaagctaatcttaaaaaaaaaaaaacacagcaaaatcctgggttattacttatgaatcaatgtatttataaagtttgaatactgtaaaacttggatataacactagatgttattcaactccaaataagcctaaattataatgactggtacagtattctttctaatgagactagaatgaaaggataattttaattgcagtaatgaaggttaatttccatctttcctcatgtttactcccttattaaaaagcggtccccttagccatggcagagacatattacattttcaatgcaaatgtattaatctggataaactctatattaattcttgtagtgcacagagctataatttggattataattaatctaaagtggcactagatttaaatgacaatataaatgaggcattaggaggcttttctattatgaatgaatattcaacaaatataacgcatattgccaagtctcattttgaaagctcccatcctagagattaatgtcagcaacaaagtacaacagcttatacaaacaccttcttcctaacgtgtgttaattccttcctgtctaaaaaattctgtgttaaagtgaggtcacactgttttccaatctagcacattcagatagtgattaatgtataaatttgccaggatttttgacatttataattgacatcaggaagaaaaccaatatacacataagtggataatcattagaaatacttacaagaaaaaaaaatccatgtaataattttttcacctgatcagattcaaagtagaaagcagaaaacttttgttaaaagttcaggtgagagtgggcacccctgtcttgttcctgattttagaggaaatgctttgtgtttttcaccattgagaataatgtttgttgtgggtttctcatatatgtatgcctatggctgattcatgttgatcgatggcagaaaccaacacaacattgtaaagcagttatcctccaattaaaaataataaataaaaaaaaatgtaccaagggggttaaaaatgttcatgtgaattgtcaatagtaagaactgtcaatgtttgggacatttcaaagctaaacattcgcatttcagtaattcctttgagttgtgtaaagtacatttttatccctatagatgtagttggagaggcatttctatagggctaaaaatgtgtcttagaaaactatcattatctaatggtctgtatcttctcacatgcctgagtcctgatgagatggtacaatgagatgtccaagaaagcataataactcatcaggccattagggagtgactgagaccattatttatatagaccagtaaaccaagctgatggagatagagcccttgtatctgtggtatgttccaagcaagactccttactcattgatgagattggagccattttcaagagattcccacaactcattctttacaaggtattagttactgaaaaccaagcacaatgtcacattcctaagcattacatgaatactcaacaaacaccaatgggctgtgtgtttgacacattcttctgaatgtgttgggttagggggtggaacataccctgcagtctcttttggtgaaactgtgagaaaatcattactgaaggcagggagaatcatggccttcctgaagtagtcaagcagctagctttcatgagatcctcctagacctaagctgactcccttgctatttccaattcttttcaaatgaagtttagatggcactgcccttgaccttatctgatcacaaggtatttcaaataccttgtcagtaaccccaggagctgtattattatacagctaggggattttttttttttttggtacattctttaggctcaaaaccaaccttaggtcctctttgttaaaatcaaattagaatcatatgctagccactatatgctagatgcaaatttaaatggtaccttttcactggattctggagaaaaattcagcatggaagggtatggggtgggtagcagagaggctcttcaaataatttgcaaagggaatggcaaatttagatttgcaaagactgaattacaaatgcaggataattcagatttaaataaacttgcacgtgaaaatggtatttttttgcacaactcaatgtcttcatagcaaagcaagcttctttagatgcggctgtcactggaattccaggaaaagatagatgactacctgaaactaataggtttgaacccgtttcagcacttcttctgcttcaatgagtccaacataataaaactaggtatagcgtgcagcaaaagtagccaatgtaatattcattgcaaccatagatttccatctcatacatacaaagcatggatgaagtcatatatttgccaaatcaaacacagaaaaagccttaggtatccacaccagatgctggcctagggtttgtttgtgcacaagtaaatgtcatgacacgaaggtttgttttcaaagacagtagctttcattactgggatttgtctattctagaagatcaaaattacccagcacctaatcccttctcaatgatatttcctcttcttaggctgaatcatctgtaaactttttcactggattttgtttgaaatgcctcaaatagatgcccttaaaaagggcaaattcctgagtgtaagttgtaaaaaaaaaaaaaaaaaacagaaagcaaggaaaaataacatttatttttagggttacgtggtttagggagggaggggggtgcatatgattgaatgaaaaaattcaagtgatatctaatcccatgcttatgaaaaattaatatgccatcagaggaatcacaagtatagctaagattaatgaaaggcgcttaaaaaattacaagcacacaaactgatttgattaaaaaataatctcgctggtcgtcctgcaatattcttcaacttatccacatctattctgtcagatggttatgattaaaaataggtcaatgggaggctactgatagaaatcacatgcaaaatgcacatgcagtgagtagcagtgggaacgttcagacagtttaaaatgaataaaggcttttaataagctgggggtaggtcagcaaaggaagggttgatcgctgggatgggtcggggagggaaaggtgaaagattctagcatcttaccagagtctttattagagtttttgccttcactattgtctctctcacttgtgtctttctcatcctcgtcagccccggctataggtttaatggctccttctgtctcctcactctgttcttctgctaagaaacacacaccagtcagtaggatggaaaaccccagaaacacacacccgaaaataaacgacgtgactatttaaaaactttgttacttaggaatcatttgcagacattccttctcaaaaaagaacatgaatttattcaaaagtcactattagaacctgctggctctacaatgcagggtttgttttttatctcaagccacttcttttatttccactgagaaaatgtgcccgtactaaattaaaagaagtcttctcaaagaaatgcgatttgagctagaaaagatttaaaaatgaatgcgaggcgattttgtaatttcaatagtagagccttcgaaactacatgaacccgcttctccacggacttggataaacggcagaatgaagcaaattctcagaaaaatgtcttcataatataatgtgataatgatgggttaaatataagacaggtgttactctcaactttcagtccttagacctcagaggaatcctttggaatttgtcagagtaagatcacaaaacttcagttatcctgggatttttttttttttttttctatagggggagctctacggagtgtaggacagaagaaggtatacttcttctatgacaaccacatcaccccacacctcattcacgggtttcacaccagctagattacatggaaatcctcatagtaactcaaccctatttaattattctgtaaatcttagctacgccgctgctggtggattaatctgtttatgcagttagcctctatgctgggtcggtgtagcactaatccgtgaaaggcccactgttctctttcatcctgcgatcatttgtctctcactgtgctgatgtcacattttaatgaatttttagcaatctgagtaatgccagataaccagacttgcaactccccacagcatggcgtgctgttttcattgcggcacaaaaaataaaaatcctattcccctgttcaggtaggaattacataaattaggagaagaaggtaaaatgggatttgaagcaccaggctcctcaatttcataaaatctttaatgaccatataaattaaccctggaaaggcaaaaggtcattgacatccatttgcatacactcttctatttgcttttgataagcagagcttttatgcagagaacatgatacaattaacccttcaagaaccatacaaaacgcgactctggacattttaagtgtcaagcattaactgaaaattacacactgcataaaattttcattgcaaatgctatagtgattgaaaggggaaatcgtggccctctccacaccccatgtttttttaataatgttctgacagcagaatgaaatatccactgtcatatgtagcagctgagcaccaaaaagaaaaaaaaattgctatttagtgtttcacttgccagccatgctctgccactatgagaccagaagacaacaggatgggggttggttctgggctcagtggcagaagctccaaagaaagactccaagtttaataacaaggatttttaaaacatgtgaaatcagagtttttttcaaccggaagtcctcaaaggcaccatgcaaatctactgatacacttcggtgttgcgccaaaatgcaggggtggtcttcagggagaggtcagtcattggagggttcgggggtaacttccctttcaggcaaatacacatgaaaattgtacttgaagatgaatcgacccttctcctggccctagcctgctttcacccttcagtgataagaggtgaccaaacccaggcctcctccttccagcagggggccaggctgggtggggaccgtggcctggctccgttagggaggctgaaatcataactggattaggtggtgttcgcccctctcccctcccaagtccacacacgtgactcgactatccagtgtcaggcctgcgacctatgcgacagcccgtggcaattccttctcaaactcgtcccagggaaggagtgcgagactactgggagcagatttactagacctttcccccccaggctggaaaacgaagcatcagagtgctactgagcgtccttatcttgaggggacataaaatggaaagggctagcgccactcctgttcataaaacattgcgcgtcaggagaagaaaacgaaaattatgaaggtacgaaaagagaaactccagtacggtctgcgtctcatcagacggtttctgcaggatcctctggtatgtgtcttaagtgtgagagaaattcccagacaagttcttctatacatcacggtggtgtctgaccccagcctgaccctggcaacagtttgagaaatctgaatgtgaacaaaggctctgtgtcagcagcagggaaagattgtgggatagacgctccccatcaacttaatcgcaaacagcagttctgaggccataactttgctcagctcctccaagccacagctcataacctccagggtggatttgcccgcactccctcggcttctgtgacttcgggcccccctccgccttttctggttcttcctttgaagtaggcaggcaattagctctaatgctccagcaattcagacctgttttgtggtttccaaggcgaaagctgtttattacaggtagggctctttggagccatagaacttggcgaatttttaatcaggcaaaaaagaatcaaagagtaacttttgtacgccataaagtttcctccaagtcaggagaaaaaggtcactttcgtttttcaggagagttttcgaaataaatttgacattcgttttataaataggctttacaggcaagagtattagggtggagaaaccactttcccctagaaaaccttgtaggttggatttggggtgaagggcaagagttggctacattctcattttcaagtaccacatttcctcaactgtaaaatgctgtaaaatgtaagatgcttacattttatgaaaaaaggaagagaattttatgaaaaaaggaaaaagtatacagcatgaaatatattaaagcaatgtcttagaactgaggaaaattacagaaaattacaaaataaagatgctaaagcagttttcattttcatcaataaatttcttcaatatattatatgtaataataataaaagtatagcatttcataaaagttatattcacactgtgtatatttcaattattttgcctcatggaaaacagagtattcatatgttaaattttatgatataattcaaatgtgcattaggtccaatagaacttcctgattttcaaataaatgataaaacatttcaaaataagaagaagacaaaataatattatagtcttataacagtacaattaaattccccttgcattgttatagggcttccctggtagctcagctggtaaagaatctgcctgcaatgcaggagaccccaaactgcttcatgctatctctatgatctaaacaccagtcagttttgttcctactgctttattatacaattgggtttgggaatcctctgagtcttctaaggaaaccaccacatactttttaaacccatggtgtggtgttggagaagactcctgagagtcccttggactacaaggagatccaaccagtccatcctaaaggagatcagccctgggtgttctttggaaggaatgatgctaaagctgaaactccagtactttggccacctcatgagaagagttgactcattggaaaagactcagatgctgggagggattgggggcaggaggaaaaggggatgacagaggatgcgatggctggatggcatcaccgactcgatggacatgagtttgagtgaactccgggagttggtgatggacagggaggcctggcgtgctgcaaatcatggggtcgcaaagagttggacacgactgagcgactgagctgaactgaactgaaacaggaagcgaaggatagcaactgaaacatctttagtttttcacatggagcatcaattctagacacttggcttacaagaattccttcttgtgcccctttttttgtctccctgttcggctctactccctcaaaatctatcctttgtatgacctacttaaatctgacttctctatgcaacatctttcagtgactgccattacataaagaaaaagctcaatcttctgaacagggcaagaatagctagtctctgtctatcactccagtctcatctttcttcacttcctacctggcacttaacttgagaaaagtctcaaatttcagggcaccagagtcacctggaagactggttaaaccacagatcgctgggctctagccctacaaattctaactctggtagtgtagagtaaggtctgagaatttacatctccaagttccagatgatgttaatgctcttggtccaagatcacatgtcatgaacacacaatagtctttgatgcctacctcctttctataagaaacactgttctgtttcttgtcttttctagaatgacttttcttcactgtatttaactcccatcttttctttatgtttagcttggtaaatataatttttatcatatataaaaatggagctaatgctacttacttcatagatttgttataatgtataaaaattagcacagagcttaacccaaaataagtatttaaaatgctagctatattattactcttaatagcttctttttatattagagagaaagtgaaagcgaagtcgctcagtcctgtccaattctttatgaccccatggactgtagcccaccaggctcctccatccatggaattttccaggctagagtactggagtgggtcgccattttcttctccaggggatcttccttacccagggattgagctcaggtctcctgcattgcaggcagatgctttaccttctgaccaccaatttagttatttttaattgactgatgattgctttacaatagtggtttgatttctgtcatgcgtcaacataaattaaccataggtctacatatgtcccccctctcttttaattgcttctttctccaaaaagtcttccctgaatgctgaactaagattagtgtttctggataagtttttttttttttcttgtgcattggtgtaaaacaacttaagttagcacgtggaaatcagtattacctacttcccctaataggtacacatttactgaaaacagtgattgtcttatttgtcagtgttccagaagaaccaaccccagggctggaattatagaaggcaggcagaacttgttacctggaacagtgagttccatttaggaagcaaaactggtaaaagaaaaagacgagtctagactctattgccttcctctattcacgttcaattaaacctaaaagaagcatttgtttggttttagtctggtttgggtggttttgtttcggtttagattttttctgtctactcaatcatgttcattattcaaccatcatcgctggcctgactccacatctatggctcttctcaaagcccctgatgacttccatgctgtgaaatccaatggccactttgcatcttacttgactttgctctgaagatgttagttactactcctttctccttgaaaaactcccttttttgaatttcattgcatcagactattgtgatgccgtacccctctgaaagttcttccttattcccctttgctggggactcctccattaaaaatctaaatattgaaatgtctccagcattggtcctaagtcctattctcttatccacaaagaatgtttgatttgaggaatcttgagaaatctgtatgtaggtcaggaagcaacagttagaactggacatggaacaacagactggtttcaaataggaaaaggagtatgtcaagggctgtatattgtcaccttccttatttaacttctatgcagagtacatcatgagaaatgctggactggaataaacacaagctggaatcaagattgccaggagaaatatcaataacctcagatatgcagatgacaccacccttatggcagaaagtgaagaggaactaaaaagcttcttgatgaaagtgaaaaaggagagtgaaaaagttggcttaaagctcaacattcagaaaacgaagatcatggcatctggtcccatcacttcatggcaaatagatggggaaacagtgcaaacagtgtcagactttattttttgggctccagaatcactgcagatggtgactgcagccatgaaattaaaagacgctgactccttggaagaaaagttatgaccaccctagatagtatattcaaaagcagagacattactttgccaacaaaggtccatctagtcaaggctatggtttttccctgtggccatgtatggatgtgagagttggactgtgaagaaggctgagcgccgaagaattgatgcttttgaactgtggtgttggagaagactcttgagagtcccttggattgcaaggagatccaaccagtccattctgaaggagatcagtcctgggatttctttggaaggaatgatgctaaagctgaaactccagtactttggccacctcatgcgaacagttgactcattggaaaagactctgatgctgggagggattaggggcaggaggtgaaggggacgacagaggatgagatggctggatggcatcactgactcgatggacgtgagtctgagtgaactccgggagttggtgatggacagggaggcctggcatgctgcgattcatggggtcggaaagagtcggacatgactgagcgactgaactgactgaactgaacgatatccctagataacttcatccaggtccactggtttaaattttgcacctccatttggatgtctgaaaggcatatcaaacttaatatgtcaaatcagagctcttgatcacccttcaacgcactctgtttgtccccagtctctaccatctcagtgaatggtaccaccattcaccaaaagcaaggctcatcagtgacctctttctccttcttatgtgcacaccaatctatcagcaggtcttattaattccaattccaggatatcttatacacagtaaatctatgtatttcttttcattttaattaccagtactgttaactgcttacctgtagcttgcaatggtctcattactgggaaagacttgctcttgcttccccacaatttattcagcacaccttaataaaatcaagccattctactgtttgagccctgccatggcttcctattttgtttaaaataacataggaactctccactgtggttatactgatcaggcctctgtctacctctatgacttcacctgacattgctctcctcttcactcttctctctccacactacccttctttctcttcacagtatatgaccgacctcttccctctgtctgtaatgtctttcccctaatttactccttattattttgtactcaacttacctgtcatttccttagagaacttctctgaccactgtttctaatatagcacctcaccagtcacataggtgggggcctcagactttactgggaatcactgtcacctggagggcatgttaaaccctagactgccgggccccatctttagtgcttctgatacagtaagtctgggatagggcctaagaatctgcattctttccagttcccatattgtgctgatgctgtctgtaaggggtccacactttgaaaacctctgctctacttccttcatcatatttgttgaaatctgaaaacaactaattatttgtatagaaataacatctaaaagggcttcccaggtggccctagtgataaagaactcgtctgccaatgcaggagacataagagacttgggttccatctctaggttgggaagatcccctggagaagggaatggcaacccactccagtattcttgcctagagaatcttgacagaggagcctagagggctacaagtccataaggttgcaaagagtcagacacggctgaagtgatttggcacatacacacgaaacatctaaaaatgagagaactaatcagccttattcaaaacttatactcaacagttcctggcaattttgagtaaattgatgattctgagttttcttacttggggtaatgaggactatggtatgatatattcaattaagatcaaagagaagaagaaatggtttgcagaggagagctcaatttggaatttgttatatttgatttctttgtagaacatctccatgaaactatccagaaggcatgggagtatctaaatataaagcttctcagaaaggttgaagatataaattttgatgtctttgtttataaaaccaatatgttgacaggtagtaatctctttttagtttgatatgtttctcatagttttgatttttgacctattattttcaacctagtcattaatgcaatttttttttttttggcttgaagtgaggaagataaactgagtttatgctaatttattttaaatatattctttggttttctatggaaaagtaacataagatgaaaaataaataatgatttataaatttaaaaaaagtattcatgagataggcattcagttcagttcagtcgctcagtcatgtccgactctttgtgaccccatgaattacagcacaccaggcctccgtatccatcaccaactcccggagttcacccaaactcatgtgcatcgagttcatgatgccatctagccatctcatcctctgttgtccccttctcctcctgccctcaatccctcccagcatcagggtcttttctaatgagtcaactctttgcataagatagggataggtgaaggtaaactttacttttaaaaatttttaaagagggaagtcctgactttatattggagggatagtttcacttgaaattttaaaacatatttcaaaaccccattataaatgtgagggactttttattattattttttgttctgtattgacattattattccagttgtgtaaatctggaaactggggtcattttatagcagaaataaatgaggtgtattatagcaacatggatgaaattcctcttaaactatgtaaatataatgcagctaaaaaggcatagcctccattttttaacacacacttaagcatgcaaatcataggagccagtgattgtgttgacacagttgtaaaaatccaatcaactcattaccaaaactaacttccagcatccaggttgtttgacttggaggagaaacaatacccagcttactgattttcatgttgtataaaaccacccatttagtaaaaaatttcactgtgtataaatgtagatgtgagaaattatccagcagaagttatttgttctctgaaaatttcctttacatatgcatccaaatttgactatatttaattttttattatatatttattatatataatatcattgatatactctatataggatttaaattttttgtgtgatttgatcagttctagctagggcagttccagagagtttatttcatagattatgagagtaacaaacgtaactcatttaagacagacaataataagacaaattacctgaggttgctctcaactgctgctctgtaagatcatcctcacaggtcctggctcccaaagaggcagtttctgcagaggacatcagaatgaaaggtagtcagcacaccatggtcagctctgcagtgtcagtcaataccacagaacccaaaatttgactttcaaagagataagcaccaggtagaattcgctggcacaccttacaccctagtggctggccaaatgagtcgaaagaacagtaagcctagatctcattctcatgatcagccacacacaatcaatcatagagaataaaatatggaaacaggaaaggctcattcagatttttcacatttggttatttggccaagcctacatgttataatgacaatggtacattgcataaaactgggagcatagttttatttctctatcaaaaaaatgaaagaaagaaaacccctcaatatacaattccctgttacctcatatcggaaagaatctgcctgcaatgcaggagatctgggttcaatccctgagtctggacaatcccctggaaaagggcatgggaacccactccagtattcttgcctaaggaattccatggtcagaggggcttggccgggtacagtccatggggttgcaaagagttggacacaattgagcaactaatacaatataggagagatgatgtgagagaccaaaacagaaaacaagtacttgaagaaaactgaagaataagttcaagtcatcaataaatccacatctttattctgatctatttgagccccagagcagaagtgttggctggctaaattcatgcccaaatcctaagttccatctaactctgctctttgagttccctgttgtaggaaaatctatgataagcaagacttcaggaatcaccttcaacaccttattttttctctacatcagttcaacacttgctatttatttcattttacaatgtacctttcatgtctgtttctctatttctctgtcattgtatctttcctgatcatttcaatagcctccacaacaatttccctgcctggaattccatgtctttccagtctaatctcttataatatctcaagaactatctttcaagaaaacagaattgcttgagtaaaaatcagagttctagaactttccaggtaagggaaccctcaagtatattacttaacctctctaagccctgatttcctcatttgtaaaatgcagaaataattacataaataatcagcaactgtaagagaaaataacacaaataaaggtaaaatgtgatatggacttcaaagtaaaaaaagctcgtatattatggagaggataaaaaagttgttatacaattcttacactgcaaaagagactcaagtttatctaatatttctaggcaatagcatctgtggttgattctgaaggttttaattaaacaaataattaaccttgaaaatagaagtgcacaccaaagcactattattacgttcactaattgtttctcctgctacatacaaaatctttggcctttgttggtaaactgtttaaaaacaatacaatcataataaatacacagtacccattcccaacaataataccaacaacaacaacaaaaaaaaacaattctcttgtaatatcttaagttagtcttgagaaaaaagaattgaggaataacttccaaatagatcatagcattgatgtctaatcaatagatcactcaagaagcccactttttcctcctggcaacttcttgcttcgttataccttgattcaatattgttcattttattttttgaatgtttttttgttcttctgttgaactctcattcatccctcaaaacccaaaacaagggtcacttcctctttgcttgcataacaattagcttttatacgtctcagcacttctgatgcattgcaataatacgtgatctatgtctgtttactcaataaattgtgagttccttaagaaatttcattttaacatattcttgatcaaggagagagtgaagactatcaaagtcaccttgttgttcagtcgctaagtcatgtctgactctctgtgacctcatggactgcagcaagccaggctgccctgtccttcactatatcccagagtttgctcaaactcacctccattgagtcagtgatgccatccaaccatctcatcctctgttgccccttctcctcctgcccccaatgtttcccagctttagggtcttttccaatgagttgactctttgcatcacctaggacacctttattcaaaatattacattacaccctatatcctgaaacagatgaatctcaagatgagaattttatgaaagcctcccaggagccttaggactctataaattcaaagctttctcaaatataccaaaaacaagtaagtcctcttatatatacatatggagaaggaaatggcaacccactcaaatattcctgcctgggaaatcccatgcataggggagcctggcaggctatagtccttggggtcccaaagagtcggacacaactgggtaactaaaccatcaccaccatatatacatataaatattgtgctgaaaataatttctttgcctcttttctagggaaaaacaatcctattttatcaaataatcttaccattgcacacacatacacacttcagtgtatcaaacagatttgttcaaatagacatcagtagtgactgaacaacaataaacagtatctaagtaaatttgatcaaaggattgctacttttcaaagatttatgataataaaaagaacataataacaaacttattaagtttccatctctgccaggtactgtggtaaactatttgtgtaaaagcagttatgtaaccttcatgtaagctagtgaaggtgatggaatttcagttgagctacttcaaatcctcaaagatgatgctgtgaaagtgctgcactcaatatgccagtaatttggaaaactcagaagtggccacaggactggaaaaggtcagttttcattccaatccccaagaaaggcaatgccaaagaatgctcaaactaccacacaattgcactcatctcacacgctagcaaagtaatccttaaaattctctaagccaggcttcaacagtacgtgaccatgagcttccagatgttcaacctggatttagaaaagacagaggaaccagagatcaaattgccaacatctactggatcatcaaaaaagcaaacgagttccagaaaaacatctatttctgttttattgactatgccaaagcctttgactgtgtggatcacaataaactgtggaaaattctgacagagatgggaataccagaccacctgcctcttgagaaatctgtatgcaggtcaggaagcaacagttagaactggacatggaacaacagactggttccaaattggaaagggagtacgtcaagactgtatattgtcaccctgcttatttaacttctatgcagagtacatcatgagaaatgctgggctggatggagcacaagctggaatcaagattgccagaagaaatatcaataacctcagatatgcagatgataccacccttatggcagaaagtgaagaactaaagagcctctttgttcttgatgaaagtgaaagaggagagtgaaaaagttggcttaaaactcaacattcagaaaactaagatcatggcatctggtcccatcacttcatagcaaaaggatggagaaacagtggaaacagtgtcagactatttttttgggctccaaaatcactgcagatggtgactgcagccatgaaattaaaagatgcttactccttgggagaaaagttatgaccaacctagacaacatattaaaaagcagagatgttattttgtcaacaaaagtccatctagtccaggctatggtttttccagtagtcatatatggatgtgtgagttggactataaagaaagctgagcactgaagaattgatgcttttgaactgtggtgttggagaagactcttgagagtcccttggactgcaaggagatccaaccagtcaatcctaaaggaaatcattcctgaatattcattgaaaggactgatgttgaagctgaaactccaatactttggccttgtgatgtgaagagccaactcatttgaaaagaccctgatgctaggaaatattgaaggtgggaggagaagggggcgacagaggatgagatggttggatggcatcactgactcaatggacatgagtttgaataaactccaggagttggtgatgggcaggcaggcctggtgtgttgcagtccatggggttcacagagagttggacacgactgagtgactgaactgaagtgaaccttcacaagaaaatcaagaggcaatgattaatctttattttacaaatcatgagtctagaggctcaaagaggttaaggtcacttgctccaggtccccaagttcaaaactgacagagcttgaaataaaacccaggtctgcctggtaaaaatgtctgtgaaattttggatatgtccactaccacagtatttaggagtctgtaaaggttttcctatcttcatgaaatctagcaaactaagagtatgaggatctgggggagttgaagggaggaggtaggtaagaaagaaattttcactagtcctatgaaaacgctgatatttcataaaatattacattccttgaatataaactgtaaccaaacactttgctgccacatagaaatcttttcatttgatagtgatttaaggaaatatgcgtgtgtgtgtttagctgctgttgcgtctgactctttgctgcccctgggattgcagcccatcatactcctctgtccatgggatcttccaggcaaggatactggaataattgtcatttcctcctccaggagatcttcctgatccagggattgaactcatctcctgcactggcaggtggattctttatatcattgagccacctgggaagcctttatagaaagtataaaatgtcaaaaccaaaatctgttatttaatctcacaattatggagactgttctgaagagactggcttgtctaaataattttataaggtaatacaacgatggctacccactccagtattcttggggcttccctggtggctcagatggtaaagatctgcctgtaatgtgggagtctcgggtttgatccctgggttgggaagatctcctggagaagggaatagctagccactccagtattcttgtctggagaatcccatggacagaggagcctagagggctacagtcccatagggtcacaaagagttggacacgaccgttcaagtaacacttttcacttctttcacagtgcagtatgccatataattctttttatatcctcaacagtgctgccttctttatacaaatgatataaatattttaataaaggagcttttaacttatcaagtgaactgattaatctatacttttctgcctgtgtaaaatgacatgtttaaagcttagtaatgatacatagcatctttcaatatttcactttaataattgctctgtaataacaaatctgactgctgttaacacgatctgtctcttttcctggctatttaattagattactaattggtgttcttcagcacctgacctttcttacttaatactatttaagaataataccactgacaattcatctagtattttactctattctgtccatttggtgatgatcacatatttgaaaatgggatcaaattatttttattaacacaaggtaggagtaattactgcattttctgaggaatagtatattgattatagtatgaacagtcagattgtatagttattacaaccaccatcactaccactagcattttacagtatctgaggctgactgacgcccattatatgtgttaggatgccccaagcaaatggtggagctatgatttgaatccatacagttttattcaggaatctgaaactcctactttagcctcctgctgcgaagagctgactcattgggaaagaccctgatgctgggacaaagattgaaggcaagatgagaagagggcagcagaggatgagatggttagatagcatcactgactcaatgtctatgaatctgagcaaactctaggagatagccaaggacagggaagcctagcagctataacctgtggggtcacgatgagttggaccagtaaacaacaacaaaagctctcttaaccaaaatgacatcagttcagttcagttgctcaggcatgtccaagtcttgcaaccccatggactgcagcacaccaggatttcctgttcatcaccaactctgagagccttttccaagctcatgtccatcaagttggtgatgccatccaaccatctcatcctctgtcgtccccttttcctcctgccttcaatatttcccagcaccagggtcttttccaatgagtcagttgttcacatcaggtggccaaagtattggagcttcagcttcagcatcagtctttccaatgaatattcaggactgatttcctttaggattgactggttggatctccttggagtctaagggactctaagagtcttctccaacaccacagttcaaaagcatcaattcttcggtgttcagctttctttatagtccaaatctcacatccatacctgatgactggaaaaaccatagctttgactagacggacctttttggtaaagtaatgtctctgctttttaatatgctgcctaggttggtcatagcttttcttccaaagagcaagcatcttttaattttatggctacagtcaccatctacagtgattttggacccccccaaaataaagactgtcactgtttccattctctacccatctatttaccacaaaatgatgggactgggtgtgatgatcttagttttctgaatgttgagttttaagccaactttttcactctcctctttcactttcattaagagtctctttagttcctcttcgctttctgccataagggtggtatcatctgcatatctgaggttattgctatttctcccagcaatcttgattccagcttgtgcttcatccagcccagcatttcacacgatgtactatgcatgtaagttaaataagcagggtgacaatatacagccttgacgtactcctttcccaatttgaaaccagtctgttgttacatgtccagttctaattgttgtttcttgacctgcacacacatttcttaggagggaggtaacatggtctggtattcccgtctctttagaagtttctagtttgttgtgatcccacattgccaaagtctttggcgtagtcaataaagcaaaagtagatatttttctggaactctattgctttttcaatgatgcagtgtatgttggaaatttgatctctggttcctctgccttttctaaaaccagcttgaacatctggaagttcatggttcacgtgctgttgaaatctggcttggagaatcttgagtattactttgctagcatgtgagatgagtgcagttgtgtggtagtttgaacattttttggttgccttatttaggattggaatgaaaacagaccttttccagtcctgtggccactgctgagttgtccaaatttgctggcatattgagtgcagcactttcacagcatcatcattcaggatttgaaatagctcaactggaattccatcacctccactagctttgttcatactgatcctttctaaggcccacttgacttcacattccaggatgtctggctctaggtgagtgatcacaccatcatgattatcttggtcgtgaagatcttttttgtacagttcttctgtgtattcttgccacctcttcttaatatcttctgcttctgttaggtccagaccatttctgtcctttattgtgcctatctttgcatgaaatgttcccttggtatctctaattttcttgaagaaatctctagtctttcccattctattgttttcctctatttctttgcattgatcactgaggaaggctttcttatctctccttgctattctttggaactctgcattcaaatgggtatgtctttccttttctcctttgactttagcttctctttttttctgagccatttgtaaggcctcctcagacaaccatttttcctatttgcatttcttttccttggggctggtcttgatcactgcctcctgtacaatgtcacgaacctctgtccatagttcttcagccagtctatcagatctaatcccttgaatctatttgtcacttccactgtataatcataagggatttgatttaggtcatacctgacaaaggatgagatggctggatggcatcaccgacttgatggacatgagtttgactgaactccgggagttggtgatggacagggaggcctggcgtgctgcgattcatggggttgcaaagattcagacacgactgaatgactgaactgaactgaactgaatggtctagtggttttccctactttctttaagtttgaatttggcaataaggagttcatgatttgagccacagtcagctccttgtcttgtttttgctgactgtatagagcttctccatctttaacactaaaagtgactttccttttgatactgtaattacttctcatgttcatttgtttctcatttgacctgagttctgctaaccaccttttctcttacaccaaccccaataattacatctccaaaggcaaagcttgaaacctaaagttttagggttcctatttttaattatgagagtaaaagtccttaccactctctctttccttgccttgccacttctactcataagcttatcagtctcattacttctttttcccttcccttatttgaataatatttattcttcaagttaactgataacattcaggcatttaatcttagttcaaaaatcatcaagttctcatatggcaaatcttgatcccaccccctgcaaattgcaataatacttaaaaaaaaaaactataatccatacaaatataatgatcagggaaagatctagaatttttaattttttaaagcaatctagatacataagcagaattctaactttaagtgtgctgggacttgtgaataaatctaatctaatctgcacttagttattgcagcagccatgtgctttttatattcttatcagtaagtttaggaagcacgtgcacatggtcaatggaagctggacttttttaaaataatgggtggatatttaaattgccaagtatactctaagatagtattggcttataaaatttacacatctcaattcctcctgttgatctgttaacgcattaaataatcatgtatcactatttttagtaaaatgtttagcacataaaatgaagaatataccaacaaacagaataaatattaagttaacaggtctaaagtaatggaaagaaaaacactttctgtagtcttagctaacattttgagttccattttactttcatcctttaagaaaaaaaaagaatgttaacccattcttattttattcttggagaaaaagaccaaattctgaaagagaatccacacatgtcaacaacttctctagcccctcccatttcttttgaagcccctcccacctctaacctcatctcagtgactcattgtagaaagtatcttagagaacaggaatatagagaaaatactagaagatactcaagttttaaaataataactgagcaattgttgaaaacctgttaggtgctaagcgtattacatgcatttccttaatcttcacagtgaatctgtcacagaaaaaccattgcttttatggaagagatgagatagcaaacttagatgttttaagcaatttttgtccaaaggcacagattggggaaaaggtagtaggatttcaactgagtgagtctgattccaaaactctgtcttctcccctggacagagctgcctccaggcagccgccaggactcctgagccaagaagcctaaaaacgtttgagtttcctgctgctgctgctctaagtcgcttcagtcatgtccgactctgtgcgaccccatagacggcagtccaccaggctcccccatccctgggattctctaggcaagaatactggagtgggttgccatttccttctccgatgcatgaaagtgaaaagtgaaagtgaagtcgctcagttgtgtccgactcctagcgaccccatggactgcagcctaccaggctcctccgtccatgggattttccaggcaagagtactggagtggggtgccactgagtttcctacctcctaaaaaaacagctcaaaggccttcaaagcagatttaccataacaatattcatatttagaagaatgtatcaagttgaacatttattactattctggtagtttacattttaataaaaacctctgcactttcttgtacattgcaaaagggaagactgtttccagatgaagcaactttgcatttaaaaatggttgcaaggggtcttctccatccttttcctatgtggatacaaagaatgtgcttctaaaaagctgagcaactcagcatgctatcaaatggttttgagtaaccaggcaacatcatcgttgttgatttgcagtgttttctcttaaatgatttcttctaggcagtaatagactgaagtgcattggatgctctagtgtcaattatctgaatggagttggatttgtaattttttattttctagaaaagtaaagctcctatattctgccttgtttggttttacttacaagttatttttatatggtaagggagcagtatcttccgggacccctgggccagaaacatgcaatcacgtctttctacttcttgaatcatctatgacctcagtgcaacgggacctcaaaagaatttaataagttcctgatatcaggtagtttcaataaattactaatatatcctcttaatgtcttgtactttaaagtactgttactaaaatatttttcttaaatttactagtgcctaatacatctctctatttaagcttctattttatttgattgtttgaaattaaaagatcaaacttctcttataatttagggagaactgaatattcctacatatcaatcaattgcccacttatttaaactcaagtccttataggatttgtcacaatctctctttatattgtctgaaatgattttcattctttagcatactatgctggcttgcctaggttgctcatcaacatgggaacacatttgcttctaacacagacccacagaccctactcaaccctacccagtcattgcctttgttcatgtggaacactggctacttatttcaacctcttgctttctatctcatttgttgctatttaattactaaattgtatccaattcttttgggactccatggcctgccaaggctcctctgtccaagagattttccaggcaagattgtgggtggtttgccatttccttctccaggatcttcccaacccagggattgaagccatgtcttttgcattggcaagtggattctttactgctgagcaaccaaggaagccctagctggtttttaatcctctactttctattactactctgcatttgacaagttttctgaatagcctcatattaggttaaaagctttttgaagttatttaatagaaaaaaataaatgtccagtagtgtatctttatcactctttcctttaattctgtcaaagacccctcatgaggatatcatttctgctacgggaatttgcatttctttgtctcagtcattatttggttcttggaaacgtctataactttgctcacacttttacctcaaagttttctgtaatgataggtgctgctccctgaagactgctttgttttaaaattactacaacaattttagagttgaatcaattttgaaacttaaaaaaaaaaattgctttctggaatctgcaatgatttcatcattcccaagattttacttcaatcatattcaatgagtgacttggacaaatgactttggaaccattatgcatgaaaccatcattccctctggctgtggagaaccagagaaagtaactctgttgaaataatagtcatttcaaaaaagaaaaagaaaactatttgagattcattctcttcgcttgaaattttgagcaaagataaaaggtgagacatcagtgacatagaaactgcccacttcagctctagctaagtggcccatagaagcttatattgtttaaaaactatttcattaagagaatattgattatacctttgtatatgtttgtactagggaaaagcaaaaaaaaaaaaaagacaaccatgcacttaagaaccaaatacacctgggcttgaatcccaactccaccactttctaactgtttgaagaggcaagttacttagttagttaagtcgctcagtcgtgtccgactctttgtgaccccatggactgtaggccaccaggctcctccgtccatgggattctccaggcaagactactggagtgggttgccatttccttctccacgggatcttcccgacccagggatcgaacccaggtctcccacattgcaggcagacgtgttaacctctgagccaccagggaagcccaagttacttggcttccctgaaatttaaggtcctaaatgttaaaatggaaacaaaaatacccacatttcaggggataagaggaagtaaaatgaataaatataaagcatccacattctacgtcacttcagtggtgtccaactctgcaacccaatggaccaggctcctctgttcatgggattctccaagcaagaagagttgagtgggttactgtttcctgctccagggcattttcctgacccagggattaaaccctcatctcttgagtttcctgcactggcaggtggattctttaccactcgtgccacctaggaagatcatctagcagtgaataattagtagatgtgctcacagatgattcttctctggcttggtccacactgctaaatagaagcttctcaaagaaaagactgcatgtttggtattttgacattttagattatagttatatatgtaatggactctctgtccatcagttgagttagtgttttaaactttttcaatatcgctattatttgtgtagatgttttagaaatagcaaatgttaacaagaccaaacactggtttcctaaacaatatagtttgcaagttcttattttttttctaaagccctaagcaaattttatatatgctgcagtaaaaatgttatgtgaaccacactgtaaagactgtttgcttcacagtggtttggccatttacaaaagtactgggttctaaaaggaactaaataagttcatttgagttttttggtaagatcctatggaaaaccctgaatgaaccttttggccaaatgaatataataaagaagataaggaccctccgctcccagactccaaactcccactatcagccttctattaagagagaaactcccagatgagccaaatttcagaatacaggtctgcaaatatggcaatctccaaaactccaaaaacctccatttatacacattgagttgagtaattttctagactattgcttatgctgcagtcacctacagcatatgagagctaccaaaaacattctcaaaacaaaaaacatttatttgtttttcctctgaaggaattcttaatgaaccagagataatacgttagagtttgcacaaaggcaagttcactgagaaaggtataaaataggagttagaactctggcctcaagccatgtagatttaaactgatttattagcatcctggagaaggaaatggcaatccactccagtatccttgcctggaaaatccaatggacagaggagcctggcggggtacagaatatgggatggcaaagaagctgacatgactgagcatgcatctgatgtgatgagcatcttggagttggtcttcccactgtcaagtgaggaaaaagtgatccattctgtctgctacaagaagtcattggaaggataaaatggaagttgttattatcacctccaggtgatcacacaaaagaaggaaataccatctttgtactatactttctaaatatttgatcttgtaaatatgccaacatggaatgcaccactactatttataataaactatcttatacagttatatatatattagcatatatatatatatggaaaattattgcttcccatgtgcaggcttatttattttgtgacttatatatagccataaaagaaaatcctcacatgactagatcaattctttttatcaacaatgtaatcactgaaataaatttaccattaacctaagatgcagaaaagtttcctaaagtgtatgtaaataatcctcaggtttttactgtttggagttttctgcatttcaccacattaggaaaggtcaaatttatatagtcatatagcccaaattatacttacgagaattgacctagggcatggtggatacaaacatatgtaaaataaatctggagagggaaagttagtgaaagtatgcatagtcccagaaaaggaagattagaaaggctaggctggagccaagaatgaaaaatgtactattggaacctaccatgaattttcaagacaatacttatgcatacccatgaaatgtttatttaataaatcattcattaatgagcaaacagattgatgagatttggcacattgcttctttggactgtattagcggcagaaaaaaaaaatggtttctgagtcatagccaagttttttttcttctttgcctggatgcaagtacaataaagggtcccttgatctgggcaaagtgagagttttaagcaggggatgccatgatcacatctacaagtttgggatgctatacagaggatgggatggaggaggaggaggttgtttaaaaaaaaaggacactggaacattcattgtactttcatctgttaccattgaggagaaatcatgaataaaggaagaatagtgattccactggaaagaaaaggaatgtcaaaaagtccaagattgaggtgagaggaaagataataagctcagtttgggacatgaactagaggagacctgattagtaaaaatgtaagtttctgaaactagatcctggaaaagaaatctgagttgaaaatcatttggaagaagtaatagataatacttatgcataattgacaggcttcccaggtggcgctagtggtaaagaacccacctaccaatgcaggagacttaagagatgcgggttcgatccctgtgtcaggaagatcccctggaggagggcatggtaacccattccagtattcttgcctggagaatggagagaggagcctggcaggctgcagtccatgggtcgcaaagagtctgacacaactgggcaactaacagagaatacatgagggaccatgactgaacccaggatacactctcatgcagtgcataaaaaagcagaggacactgagcggtcctttctgcagggtgaagtgctttacctttgaaattgtttagaattgccagtgtgtggtaaaaataataattaagcaggctaacctccactcagttctactactgtttttaaattcctatatgaatgctgcctcttcattgcctgaactggggtggaacattcccactgtgccctccccagataagagaaaaacagtgaagaagactcagcaagagcagtccatgaagcagaagatccggagagaatggtgggtgagaagcctcatgaaagagacatttcaaaaagaagggagatgtgaacttgctacaaggcactagttggtctagtcaaatgagaactaggaattggccatgacatgtgataaagaacgggtccttagggtctttgaccagaacttcttttgtggagtggtgcagagaaacacccactagatgtggatataagagaaaatgaagaggaagaaatggagaagtgacgtatggacaattctctgaggagttttgctataaaaaggatcagggaaatgggggagcatgcagaattggtgtagcatcataggaaggtttcataagtaaaatgatgtagatagagaatgtgggtacgagataggattgggctagtggtgaggagaaactcatgcagaagagagtgaggtagtaacaagggtcagatgatggatttcacaagatccagatggatgtggatttctgaagcaagtggggatggcaatggaagtcaaacatcattgaagtcaatgaaagttagattaggatttatagaagttggaggctctcaggatcatgacaagagttggcgagaagagttggggggaataggaagctacacaggagagaaaagaggtgccaaaatgaatgagaatgatgtaaaacagggactagaaaagtgggccagagagcaaaacccattttactttaagatatgaaattctttttgtcctttttgtgatacacaatgacagaaaccatttttgttgaataaagatttgaccagcaatcctacctaactatgagccaagaccctgactttttccttgtagatatgagtattatggaggccatatacgcattaaaattatatcaagaaaaaatgaaaaaccttgcagaacataaacagttccctattaaatttttggatgaagttttatggcaatactatcacaccatatttttcatcatctttctaatgttatacacatagcagaggaattttaggatttggtacaggtgaggaaaatatctcaaaaatgtaggatgacttggtccattaagttcactgtcatgactaagttgatgaagttattcatgatcgtaactaatgtaaaaagtgacatatatgctggaaccacattattataaacatcttacgattaacaaaccaaaaaaaatctgtaaaaatttaaagatatcactattctaaaatatttgatagtggcaaacagtcagaaaaagtgaactatataatgtgtggacaattcacaaatgatgaccagaattcaaatacataaaggggtaaaataaacaaaaagtcataaatacagtcaccttaagaaaacaaaaggtatgttgggggaaggaagtagaggaatctagtggtaaaagaaaaaaaaaaagaataatgaaaagtaatttatttctctttaatttcacaaactataaataaaaatattttaagccaaatgcagaattcccttttgaggatttttaacattgatatttttaagggtgtatgaaggataattatatgtttgacccaataacataaataatatggaaatgaatttcatcttttatatgactaatattttctttttctatacactatacattttttaacctgtatcaccctaaatactctagaactttctagagtaaagaaaattgacctatatcaacagatactatatcagcctaaatactcagatattatatcacccaaaatactctagaactttctagagtaaagaaaattgacctctaatttatagttctgtgtctgctctttgcagctacactatgaattgcagagaagtatctctttagagtcacaaaactggacgtagggcaaggtcaaatggaatcaattttcatttattccagttcttccttcccccacccccatgaaggggttgcagggtatttatggattggtgttgggacattttgttttacttccttctgccaaatgcacagtggcaattctgtctggctaaaagtcttatgaatggggaccaacgaatttctcctggttattgatttccaacaaaaagtctcacctcccattaatgtcgtatttcaccttgtgtacagttcacctcatgacctagtcctggatttgttttcattcatgcattcagtgagtctttactaaatactgactatgtgcaactctgaagtacaacagcacagtttatagatattttagtttaatcagtcttacttcagttcagttcagttgctcagttgtgtcccactctttgcgaccccatgaatcgcagcacaccaggcctccctgtccatcaccaactcctggagttcactcaaactcacgtccatcgagtcagtgatgccatccagccatctcatcctctgtcgtccccttctcctcctgcccccagtccctcccagcatcagagtcctttccagtgagtcaactcttcgcatgaggtggtcaaagtactggagtttcagctttagcatcattccttccaaagaaatcccaggactgatctcctttagaatggactggttggatctccttgcagtccaagggactctcaagagtcttctccaacaccacagttcaaaagcatcaattcttcagcgcttagccttcttcacagtccaactctcacatccatacatgactactggaaaaaccatagccttgactagacggaccttagtctgcaaagtaatgtctctgcttttgaatatgctatctaggttggtcataactttccttctaaggagtaagcgtcttttaatttcatggctgcaatcaccatctgcagtgattttggagctcccaaaaataaagtctgacagtttccactgtttccccatctatttcccatgaagtgatgggaccagatgccatgatcttagttttctgaatgttgagctttaagccaaccttttcactctcctctttcactttcatcaagaggctttttagttcctcttcactttctgccataagggtggtgtcatctgcatatctgaggttattgatatttctcctggcaatcttgattactcagataccaaactggcctggacttacattgtttcaccttccataaaagagttcctcaaaggctttcctgtggctcagtggtaaagaatctgcctgccaatggaggaaactcgggtttgatccctggtccaggaagatcccacatgcctcagagcaaagaagcctgtgcaccataattactgagcctatgtgctactactgaacagctactgaagcctgcatgttctagagcctacagtccacagcaagagaagccagcacaaggagaggtctgcatgccacatactagacagtacctccactcgctgcaactggagaaaagccctcagagcctcaaagacccagcacagccaaaaataaaaataaaattaataaataaaagtagagttcctcaatgcttattagtataagtaatattaatagactaatataagtataatctttaaatgtgataaataaaacaacccctaacatggttttattaaactacatctttatgtcacttaaaaatcatgttgaaaaatgacgtttttttctagtttaaacaaaaaaaaaaagcttatgaacatattatttcttctttgcactggttgtttaaagcattatgtttgaaaggtggagggttgggcctcactattacagcccctgcttttcgcccctccggccccaggccaagcttgggaacttaagcggaatctttgactctttcgttgcattgtatttagtcgataagtttgctctgtggatttggtttcaatgttcttttctatttgcccacaattccctcagtcataatacataataaaacacacaataacaatacatagtctcctaatgtatccaccacaatgactgaccttgagccaggttctgcctccagattctcttaacattacccgtctgacacactactgccacatcacacttcctaaaccacctctgcagtgatgtcattcttatgctaaaaagcttcgatgccttattttctgcctcatcaaatctaaactttgctcagcttccaaagccttccatagtctcaactatctacttaatttttgtcactttctcctaaatggtcactattaggcactctgtttcagagaaggcaatggcaccccactccagtactcttgcctggaaaatcccatgggcagagaagcctggtaggctacagtccatggggtcgctaagagtcagacacaactgagcgacttccctttcacttttcactttcacgcattggagaaggaaatagcagcccactgcagtgttcttgcctggagaatcccagggacaggggagcctggtaggctgccgtctatggggtcgcacagagtcggacacgactgaagtgacttagcagcagcagcagcaagcactctgtttagtttcttgcatctcaacacaatcctgccaattttctttcatgcctaggtctgaaccacttcatctcccctctcagccttaagggctatgcctacataaattaccaggcaaataaacagatgcagagacagacaaatataactgtattgcactttcccaatcctattcattcttcctgtcctaatattcctaatatgactattcataatattcataacaaaccactcagatcccctgctgctttgaatagttctgaacttgaaggagttcctcccatgatggtttaccttacttactgtgtcaagtacactggttctgtcttctgggcagcttccatactccttcagggcagggaattttaaatcttctatcaacaccccagggcaaatgctacacccagacctgctgtccagtggattcctctcgaggaggttctataatcaataatggcaacaaggaagaaggatctttttctccacttcattctgattctgattccaattaatccatcaagcatttgttacacttgctatgaggggcaagtatttgggcttctctctctcaaagggaaaaagagtataaaatcctacagagagaggctaaagagggagcaaagttctttgagacatatgccactttttatgagcaatctttcttcctttccgtctcacatacgactgttacagtattatagaaatgagttcgcctctgctgttttcctctcactagtctcttcttgtgactggcctatgaatatgtaagtctttatatttaatcctttgaagttcaagcacattcttgcttgaaacaaaagctctagagaatgaaataagagtatacaattattgcaaaaatagcaaaaacatcttcccttgagaacaatggtccagaaagatctggctgggtgctgagacagagtgtcaacttgacttttaattttatgaattatgatcatttggacaagaaaatatctttaaagggtcactgtcatttctgtaaatgggaagaaggctgaatgtgaaaagactgaaaaaaaaaaaagaaaacttatgagcaaatagcaacagtacgttctccatttctctctctctctctgtttttgttcctttaagaggaattttttaaagtgaggaaattgcagttaaaaattattttatagcctttaaaatgaaaacatttgcctattaagctctaacgacctacaatattctatctgtaaagcatcatttggccccctgctgtttcatttaactttagctgaacctttttttattgcttactaatctaccctaatttgcctaaaccccttatttgccatttctcaaactgtttgtttacatctcactggaaatgtgtaacaataacaaagtgctttaaggactagaaataatgatagatttaggcatgcaatttttcttcacagtataaaagacattcaaattaacacacattcactgagcgcacactaggtgacaagggccatatgtggcaagaagatagtaagatgaaaacaacctctggtgccttcaaggagcttgaatctggaagaggagacaaaatagaaacaagcccacattgtgggaagtgacctgctggctgtaggagccaggtatgtttgacacaaaaggacacagaacaattaactctgcgagaatgaagcactaagcaacacatgtctcattctatattatgtcatttaaattttttttttttctgttctggagaaatgttttatagagaaatggtaagaaaaagacaatgatcagccttcaaaatcgtcccttcagcctacataccaagcggggaaaggtgaggagaggaataaattaggagattggaattgacatatacacaatacaatacataaaatagaggatttccctggtggctcagtggtaaagagtttgcctgccaatgtaggagacacgggttcaatgcctggtacaggaagatcccacatgacacagagcaactaagcctgtgtgccacaactattgagtggtgctctagagtttgggaaccacaactactgaagcccgtgcaccctggagcctgtgctgcacaacaagagaagccactgcaatgacaagtctgtgctctccaactagacagcagcccccgctctccgcaactagagaaaggccatacagcaactttgtcaacaagagtccgtctagtcaaggctatggtttttccaatggtgacgtatggttgtgagagttggactataaagaaagctgagtgcagaagaattgatgcttttgaactgtggtgttggagaagactcttgagagtcccttggactgcaaggagatccaaccagtccatcctaaaggagatcagtcctgggtgttcattggaaggactgatgttgaagctgaaactccaatactttggccacctcatgcaaagagctgacttatttgaaaagaccctgatgctgggaaagattgagggcaggaggagaaggggacgacagaggatgagatggttggatggcatcaccgactcaatggacatgggtttgggtgaactctgggagttggtgatggacagggaagcctggcgtgctgcggttcatggggtcgcgaagagtcggacacgactgagcaactgaactgaactgatacagcaactagagaaagtctgtgcagcaatgaaaacccaacacagccataagtaaataaataatgtaaatgtttaaaaataactaaataagatagataactaataagaagctactgtatagtacagggaagtctactctgtaatgacctatatgagaatagaatcttaaaaagagtggatatatgtatatgcataactgagtcatttgctgcacagcagaaactaactcaacattgtaaatcaactatactccaatatcttccctggtggctcagaggttaaagcatctgcctgtaatgcgggagacctgagttcgatccctgggtcgggaagatcccctggagaaggaaatggtaacccactccagtattcttgcctggagaatcccatggatggagaagcctggtaggctacagtccacgggtcgcaaagagtcagacatgactgagcgacttcactttctcacttacttacttatactccaataaaaattaaaaaataaatacaaacttcccttcaaacctatgtaaacagcagaatatgataaagtacagtgatgctgaattgggaatcggacacttgggttgaactatggtgtagccttgtaaccctgagtaagtcctaaaattaccgagtgacttgttccctcagctgtaaaatggggggtgggacacacatgagttttaaggacccctttggctttcccatgatctgaacatctgcacttacttttgtcaactcacaaggacttgctgcaaggctgaggagaagacctcataagtttggacaatgattcacctttatctgaatatgttatttgtgtgttgatatttacaaccctctcttttcacatttcctttcacactattagccctatggtcctttatattcacataacacttaattattttccaagtagattcacattcactatctcaagcactctaactccacacactcaccatattccaaagaatctttcctctctatacactaagactacatcttataagcttcttgttcactcttatttcaaattactctgtgtctaatgctatgctttttttctttcctttcttctaagaggaaccagattcatcattttctagctcctttctaccctcttttctcagttacccattttttgaaatcactgaagtggatttgttttgactgagtgcttaaagcctcaaggagcagaagcacgaaggtgactttgtacactacttctgtcaagttgatttaggaaaactctggtttcctaagatgatttccttaaaaatatgatgtccctggaagctcttaagttagtggcttgtactggggaaaaggaagtccatctatgcagtcaagatgcctgagcagcacccaccctacacagtgagtggggttagactagtggagtggagtttcagagaaagctacaaacacaacagcaccagagagtggctccatcttgagaaatacagtttttaagtataacccaaagtatgtgtcactagctttctttcagggttgttggaccttagcatttctgattgaggaatactaataatctggtagaagttatggactgctttcctacgaaaatgcacatatggataactccatggggaattacgaagtggcatggaattcccaggcccatggatcccaggttaataagctatgcacagataactcagataagctcttttgggggtgttatgtagctcttagaaaagtaatctccattccctttcattgcattgaaggtgaaggtgaattcgctcagtcgtgtccgactctttgcgaccccatggactgtaatctactaggcttctccgtccatgggattctccaggcaagaatactggagtggattgccatttccttctccaagggatcttcccgacccagggatcgaacccggatctcccgcattggaggcagatgctttaacctctgagccaccagggaagccctttattgcattaatgtacccttaatgtattaagtaaggtttggtcatctaattgagacagtcataactttttagtttctttttttgtttgtttgtttttagtaatgagggcttccttggtggctcagtagtaaagaatctgcctggaatgtgggagacccaggtttgatccctgggttgcgaagatcccctggagaagggaatggcagcccactctagtattcttgcctggagaattccaaggacagagaagcccagtgaggtactgttcatggggttgcaaagaactggacatactgactaacacatacaaagacaatgtttatcagagattatcgtattaagtgaagtcagagaaagacaaatatcatatgatatcacttacatgtgaaatctaaaaaaaaaaaatgatacaagtgaacttatttacaaaacagaactagactcacagatcaataaaactaagggttaccaaaggaggaaagggggagggggataaattaaaagtttcggagtagcagatccaaattactatatatataagacagataaacaagaccctattgtatagctgtactcagtatcatgtaataacctataatgggaaaatatctgaaaaagtatacatgtgtgtgcttagtcactcagtcatgtctgactctttgcaaccccatggactgtagcctgccaggctcctctgtccatgggattctccaggtaagaatactgaatgaagattggtgccatctccttctccaatatatgtgtatgtatagatagatattttttaaaagacagtgttactgaagaataatacaagtaaagaacaactgtatgttcccaataaaagtctttgaaaagaatactaattcaaatagacactgaaccccagatgaactgaatgaagtctgcagcacatttgaacagtcagcgggcactggctcatgccacctatttcccagtgatgtggtcacttactttgtgtgaacaggatcaaaaaaggggggaggggcaatgccaaaccacacagacttgtttacataaatacaaattagctgatcaccgaggtaaaaacaaaacagaactcttcaaaagaaaaactgattccatttttctactacagaaagtctaaaaggaattcaatgattttttagactaaaataattaaatgttttagaatcattggcttacgtattggcaagaggtgttactacagtagcttagaagtgtaatggatctctccaaatacttaactaaatccttatgtagaatatagttgattaagtatagaatgaataacaataactaacagaggtcacccagagcatgtaggttaatcagaagactatccaatgtttctgtattatggctaataaataggaatatctgagctctggatgaataatattttcaaaaaggcattaaaataatacacaaagcagcttcataaaatttaatatgtattctacaaaaagtggtgaaatttttttatttgaaaaccaaactgatgaagaaggaaagattaaaggattcaacttggttttcaaataaagttgatttccagacatcctgtttaattctccaattcaaccacacatttcatcactaaatacctaagtatgaaaactctgaaggatgctgatatttttggctcaccaacttttgtgatgtcctttttttttttctccaataaacttgtaaatattctcaatcaaaacagaaggatctgtcataagactttacagagggggaaaaatgctttagaaaagtttggtaaaatcaagaaatagattgaatacttataatactcatttctaactatcttcatgaatcgaagaagcaaagtaatgttcttttttccccatcaatgtatctggaagtcaagacttttcttataaaacacaaaaccacacacaaaaaaatatttaacaataaacctattttaaaaagttttacttttatctacacatgatactgggggcattaaagatattgagaaaagccaaggagcagttcaaaaactgaaactttcaaacactattactgtacataatcttttctcataggcaccatctttaccttcaatgttcagaataatattttctatttgtaactatatcaatgaagctagttaattgttgggaaaactagtcagattgaatgccatcaaataattttaaacaacaacacaaaaacatttgtctacatttgtaaattatacaacatgttggagagaaaaacacattaatccaaatactgtgtcatgaattcatttatttccctacaatccatattgaacttaaatgtatatctctttgcttttgtcagctcattcaagtgaaaaaagggagacaatgtttaaaatattaaagagttttgaagatacatgccatgtaaatatttatgactattttacctaatatggttgagaagcaaacattccactattcttttcctccaaagtatactgttttctacatttgacttaatcacccaccgctacttactatgaaaaattaaaaacacaagtttatcaaccattcttacactgaaactcaacaaagaaaaagaatgcctgttctttattagacaatatgaagtgaactcagagttctcactaaggttcatagtgcacaactaactaattacaagcctaaaagtttcatgaggttcaccccaggtatcacaagttgaaattccaggcctctgtgtcattctctgaaacatctgcaacaaaatttaacattcttgataaatgagataagtgaaagtatttacttaattagattttaaagcatatttattaacccatacaacaaatactaaattgaaaagttttacatccaaagccaacatggaaacatgcaatggaacttaatattgactttcgaaattgatgccttcaatacggttaacttaatgcaactttcaacatacttcctaggatatttgacttaattaatataagcccagactaaaaaaaaaaaaaaaaaattaactcataaaattaagcctttccatcactttaaggtaagagagatatgtgccttcttaacactgatttccccccagctttgttcttatattctacagattccaaaatacaatatacagctatgcatatctatgtatacatatacacaatccagtgcagaaaagcatctgattctatgtttatccagagtaatctcttttggtttccatcctgccaaaccacttctgttgtgtccagcagggcaatgacaacatacaccttcttgttattatttatgtatggagggccaaaccaaatgtctgggtgggtcgccaaagacctaaaatgggtaggttttttttcatccacaggacccaattacatttaaataaactaactcctagtgaaagattggctccaacagaaaataccaggcaaccacagacactgaaattaaatcacagtcctaaatctagaagccaccaacatattgttaaaaatagcctttatttcatctccatatacatatacaggcaaataatgcacattagtaatgagaagaaatggtctattttattccagagggtgcacccttcactactatttcctaacctgtgaaagttttccatctcaggctaagcatgtgaaaacagaggccgctctaaggatgcctcttgttgcagaggcagaaaaacaactgtcatgaactgcttaggctttaaatggatgagtcctactggttggtcctggagtggcagagacttgacaaatgtgggaaagtcctcagctgtgagatgggggctgaggttgtgggctcctggtcaattgaaaggttgcattaaatgtaaattataggactcttccttagatatatactcctttcaaccaggtggaaggcaaacactgtcgtgctcattcggagatggcctggtgagggcttccaagctgggagaggaagccgggcagccaggaacaattataatctccatctctgaaggacggaaaggaaggaaggaaatatttttatataaaaccatattaaatttcctttttaacatgcctctatgtatttctccttccaatttatatgaaaaagtattagttttaaaactacagcagaactggcagtaaatatcacaggaacaattgttcttttattaaatatttattgaaataaattcctgtgctttctcatttttcttctctagttccaatatttatttacagctgattattaacatctgccagtataactgtttcatccatacagaagccgaagggtaaaaaagtcgcacacacccttctaacgtgacctgtagttagacagaaaacagttttcccagtcactgcttggcttcctgtctgtgacctctgaaaagcattggaggccggggttaatggcctttccaatctctgtgataagaattcattttgttctattaccagcagttatctgaggagcctgctgcatcacttcagcagggttcaatcaatgaggggacctaatgaagtagccagctgtagctctatttccctggccagctctatcagacaaataagagctatcagtcacatcttcaggctgatcccagacacagcatcttcacaggctgaactcgtatgcatatgaactaatgatactcctaccactttcgtgcagtcgtctcttttgatatagcttccctgacactgaaaatggaatgggatgagttctgagttgttgtagtaagaggacagacaataatataagaagaaagaaaggtgggtttgcagaacagtggaaagagtttactctaagagtttaaagttaaaattagcattacaaaggaaactttccatcagctaccccttgaatatttccacttcaggttggcaatttttaatcttcccaaagggaggaggatgaaaaatcattattttcatttttattgatattaaaaatctaatatcaggacttgcattttgagtaagccatcagaaccaaaatacaattacgctgtatttttactttggccaaatatcagtcagtgtaacaccataagttaatttagggctatttcatgttggctaatatcagtaaacccagatagagaaaactgtatgctacagtaaaactctattcttaattttatattttttaatgtttaaattattagtttcattcatctctaattcaaaagagcaactgtttgttagtaagtgctattttcacacatgtaggtttcagaaaggaaaaaaaatcaaagccttgcacctattagtagcctcataaatgtattagatggttatcaggagtcctgttcaaaatgaacccctttatggaaaggggtgctgatgatggctctacagcttttagactatttctctcaggcaatcactgcttggcttataggacgctatgaataggacattcatatttgctgatatgctgaaagctacaagtaccttagtttactttattaggttaatcaagatgaatttcatggaatacaatctgtattcttttaacttggctgctctctttgtcaatttgaaaggaaaaagcatggctatttgttgtttcgctaaagagatgatttctgagggaagttatatcagttaaaaagtacttgctagccttgtacttaataaacatattcacatagacaagaatattttatttcataagagatgatttttcttcaatcaatattactgacataaaatacctatgtttatgtaaattatttatgtgaatgtatttatgtaatttatttatgtgaatatatatgtacatatttatttacgacattttctacatttgtgtagaaagggccaatcaatatttaaatgactcactttactgacttaaaattaactttcaatgttactaatatattatgatattataatattagcaataatactaattattatgacatatattatgactcatatactatggtgcagtcccaaagactatctccaaatgtctttcagtttttatgggtgtataaaactgctttcttttcatactgcaatccctgagatacctgagtgatcaggttctgatatcagattattttctcatttcaaacctttgagatgtaaatgatagataaaggtggagtagataagtggcttaatgtaacagaaaacacaattgtgatatctaggaaaacaagggaggggtatgtgtggtgtgtgtgtgtgtgtgatgtgtgtgtgtgtgtggtgtgtaggtgtgtgtgtggggggtgtgtgtgtgtgtggtgtgtgtgtggtgtgtgtgtgtgtgtgatgtgtgtgtgtgtgtggtgtgtaggtgtgtgtgtgtggggtgtgtgtgtgtgtggtgtgtgtgtggtgtgtgtgtgtgtgatgtgtgtgtgtgtgtgtgtgtggtgtgtaggggtgtgtgtgtgtgtggtgtgtaggtgtgtgtgtgtgtggtgtgggtgtgtgtgtggtgtgggtgtgtgtgtggtggggggcattcctggagttttcaggatgtaagtaagggtgaggaggactatctttgctgcgtatgtaaacagataagaatatgcctagcaggcattttgggaacatctgtcaattttttatagaacatactgattgtgggctattgattgcatttaaacaaagttgttgcaaaaaaaaaaaaaatcagctaacaattcgtgtagaaaggccaatcaatatttaaatgactcactttattgatttaaaattaactttcaattaagagatccataggactcttaactgcgacacttatccattcaagagaaaataaaggtacatttatcgatacacttaaacagcagtggctggtttcctatcgactcagtcatttgcgctgggattcgttagcgtcatcagcctttaactcgcttactaggtcttcgcggtgtacaacactgcaagatgtaggaatgcgcaaaacaacacaaagaaaggatagaaatttaaacagaatttaaagatataggaaaaaggtaagtcaatcttacacttccttttaaaattgttttcttttagtatgatggcagcaagactgtgtagatgatgggggtgactattagaaacagaagccttttttaaggggctattttttcaaagccagggctttcgacatggcacattttgtgttgtgcaattgtgtaaacgaaatctttgaacaattgactagtaaaagctttattggcttctattgactcacaagatcacgaacttgcatatcctggttatattataatcaatggcagctaagaaaacaatttatagaatttttccaaagacgataattgcatttcccattggaaatactgtctatgtgtgtttaaagccatatttattcaacagtattgcaaagaaatcacactagactgtgctgtagcttttggatattttaccagatattatatttgatcatttttatcagggttttcatgaaaataaagatataaaaatcaaactgtaatatagaaaatggaaaaatacatttaaaatgcatagatcaaaacatttatccatggatcttaaaaccagaattatccatctaatttcttttgtatttttattacatctgaaggggaattctggatacagaggagggcactgaatgtaaatcctttactgcaatttctaatattatatcagaaaaacaaaactgaatgatctccacagggaatggcatcttaacagagctgaatcttcaataaccttgattgtaatgtgtgtggcagtgttactctttttcaggaattcaaaatgataggtgttcttttttggtttcgaagacaccacattgcctacagtccattgatctctttctcaccttcttcactgtgcaaaactatctataccagaaagaagctgtctcgaacagaacccccagcttattcccttacagataattcctggtaagagagacagaacagccaatctaactccacttgtaccgaaccgaattttaattacgtttacacctgtcattcatcttcattctttgataatatccactatgtttacaaaagatgtttacagtcatttcaaagaccagcccatagttctttctctgggtaccaagtctagagtagttatactttaccaattctatctttagatttgctctgaacttgtaggaaatattgggaatggataaaaatgaaatagagatgcaaaagctcaggacaaaaacaaaataaatccctcctcaaatagtttaaccacataataccagtgtagcataatttgtcacatattatacagttacacttactaaaaagtgcatgatgtcattattccaactagaaatcagatgatgatactaattaagtgatagcaggtggcagagggggtctgtcaaggtcctctctgatctgcagagagagatatgtgcttctctgtctaaacacccaggagtagtaacaattggcttaagcactattcagtcccaaggtgccccgaataggggattcgctttgatttaacacttccttattacatcaaagaggtgaaaaaggcatctgtatggattggcttgcaagggaaaaaaaaaaaagtttgtctttaacctcagtatggaaactgtctttaagaactctgggggtagttggaaatgacccttgaaacagatattttaagattcaaaccctaagtccatgtaacaaacattattaaaagttcagttctttccaactcttgaaagctacaaactgccaattatagtatgataaagtctagaactaacccaaatctctctttggtggacataactgaaatgtcactccattctacaaaatataaattatcacctcagccaactttacatctcctaaaaatggcttgctaagatttttttttcctttttgtcactaatcctattttgtctataaccaagctcacagaatataccattcttacagtaggcactggcggatatggactatttccgtgaaaataacactgagtctgcactttatatatatatatatatatatatatatatatatatatatatatatatagttcactgatcatacctcaggaattccatagggccatctcattcttcccctacattcacttgttatcatcttaatgacataagacattaaatggtgtggagctaggaatcttgtctttcggacgatcacactacgtgttatttgaatgggatgttgtaatttaacagtgatagaaaagatcggcttgaagatgatgagccatgctgggtgaatcatgagagagcgcagacaacatatgcctaaaaggcaaaccaaatgggtcctataaatgatggaaaatgagtgttatctaatttctgaaattctcttatccagcttgatctgcctctgtgctgcttgtttcaggatcattattgtgtttttttacaatagatcaaagacatggttgataagacttgattctagataaatttgttacattttcagttatcttacgatatatgaaacctcacagcatgcttagtttatttaaaccttttctttcccctctaaaggcttactgacaccatcatttcagaaaggtttcatatcactttacccaaatcatggctaagacggacacaaataattacaggaattagtgctacagggtgtaaaattgttctcttgtagtagaggtgcattcatttcattctggaattccctgctgagaaatgatgtgtgcaaactatctaaggacactgtaatcctctgattttttttttttaaagagtaaagttgcatgtaatctttgactagagaaaaaagtattagcaatgttcatacagaggacaaatgtcaagcatcctctgctgaactcaataattctagtttaatattttaaaaagccagaaatttaggaaaatcacttatttctactttcacggaggtaaacttaatagacttaacagtatcaaaaacagaatggctacttatctttagtgactaatgaaataggtagtctttcatgatctgagttcctttagacattttcatgtatatatcctttacaacatcctcattttccatattataactgaagtgaatatcccttaaaaaggtcagtaactaccatctgtaaaatatgggaaacaaacatggtcatgtgccatatgccatttgactaactgtgagaaatagaacaatggtgagttacatcacctagcaggttacaggcgggattttgaacttcttgttcaagaacagaaaatcaggggcatcaggccccaggcccccttgcttaccctggcataccactgattagttcagccttagtcaaccagaaatccttaatcttctctttttaatattgaagaggtaacccctttcacctacgtgcggagcctgccttttcatcaaagctcgggagattccagccacaaaaatcaatgtatgcatgttcagagtagttttcagggttttgtaagacaaatctctcaaatggggacgagtttcatgctattgagctgggcttcgatccgaccaagggaacgaacagcacaccaacagctcactttcctgggctccagcagcagggcgggggtgggggaccagtatccaccaggaacacagctgtggaatttctccctgacctctcacctcccctaatccgactttaaacctggcagtggactggttaaataaataaatatttaaaggtaaccccaaatcaacaaacataattaatttctcttttccatgttaatgacacttagagaagtttttctgccgctggagtgcttcgcaaagccagggccaatttctggagaatcaggtttcctttttaaaggcgtatgtttgaaaaaggcaaggaaaatgttcatttttttttttttttcctttgcttcaggaaatggatttgtctattgagtcaagaagggcaatttgttttaaatggaagtatttctttcctagtatttatgttactcactaaaagctttgattccttaatactttaggcctcctatctttcaaaaatattcaacagatatattttagctatattttagttattcgagtttctctcttattagaaatctgaaagttatgaaataggtattgccatatagcatttttgaattacaaattaaaatgattcttttaaatctggggcattgtgttacactcaactctcagggtaaaattgactctattacctatgttacttctattagtttcataacttcccaaattacctgatgttaaatcaatcatgactttatacagctacagccttcctttcataaataatattttatcctggcatgaataaggcatttgaatattttctaatattttagaaacatcaaagggaaaccatctcagattcttcatttcattctgagatgaatattttttcaggcattaaaaaaaagaaactactggacttagtacaaacattctgaatctgaaatgatgatcaaatattacaatagaactatttctgaatcaggtgtaaatcaattttgcataatgataatgtggatgtaaaatatatactgttctttacttcttcatacaaatggcttactatattttcattggtaggttgtcaaaatgagtttttaaaatgaaatgtaatgagattttatgcaaagatgattctaatgatttggggtatatatttataggagatttatttttcttttttatattgagtacaggttctgaatttgcagcatattttaaatcaaacatttcctaaactaaaaaaaaaagtatacaatcattagagcttttttatactttcttagcagcaacccagctgaggagatatatactctgagcattttcataacattacttactctgttatcatcccttactcttaagatgtcacctctggaccatgattcacactttctttaaaaaaaaaaaagtcctattggggcccaactaggaataattaatataaataacttttcaaagtatagttaccttagttgtacaacttcttattattgtataaggataaatattaaagccctggctagattacttaaaaaattaaatactaattttcaaacatgaaatgaattgtttaatatactatgtgatccttcccactccactccactgcttgaatacacacacacacacacacacacacacacacacacactcacacatacacacacactcacacacatacacacacacacacacacatacacacacagtcacacacacatgcgcacatgcacattgtttcatcttccaaaagtctgaatttttgtttcagtacctcatagaggaatctcccttgttcataaatattttaaagtaatttgtgcctttacagttaaatggatattgctaacttttaatcaacagctcaagtgtgctggcagggattagtgaaaaaaaagaaaagaaaagagtgctatcatagaaagttatcatactttttggtctcagagccactgaaaggatacaaaagccttgtttggccctgccctggggtctgggacctcaagtctaaataagtaccagtagacacaaaaattttctcatatttaaaaaaggtatttacctcccaatttgaatgtactaataggttcgtaaggaatgtagtttcattcttacatttcttttgaaaacattatttttactctcaagaaataaatacgtctctaaaagtggctgtccctatggtataaaaataattctgaagcctaaagctgataatcttgaattcaacatactatgagagacctctgtgtacacacagtgatgaactctgtgaccctttggtttaatcccaaacttggtaaagtcatgttttctaactcaaagatgcatttcatactatatcatatagaggacaccccagttaagccatacttctttactggcagaacttcaaatgtcatcttgagtttcagaaaacacactttcttttccaaagtaattagctaaggcagagtgtgtgtggcaattaaaaaccacttgcttgcagaagcttgtaggcattatgtaatttttttatgctacaagtacatatgtgtattcttgcctctagcttaaatacagtgagtgttgtagctggttgcacaggaattgtctcaagaacattaaagcaagccaaacacgattgtattccaacgaaaattgctctctttataccgtgtattgaaacttgataactgttggttataaaattcctttgattttctgtaggtaataaaatactttggcaattactattgacagttctggataatcttgaaggctgccttgcctgcagaagatgagtgttacaaatcactccactgaaagagggaagaacagcagcaggcagcagacaggtttcaatttcacaatgctgattatctcattctcgattctatgcatgcctaaatctgagaatccctcaagcagctatatggacttctacttttaaaatgcctattacgctttcatactttctcctgcttcctgaagagtgccatttcgccaagcttaaatagcagaaaattgcactgcttttcctctgcccatctcctcaatctctattaacctgaacaagaacaaaggagtatgatggtccggctctaggtggagaaataggttggaagttgtttttcatttacggccacgcatatttctgcttcatcaattcattctcaacaataaccggcttttaatgcctcagcaaatgacgacctgtgcaatatttctcccccccagtatataaacgtgtcagtccttgttccatcagtgtgagtacactcacatgcaggcttccacacacaccgacattttattatgtgccacaaccccaaatgaaagtgcgtggttattaggacaggtcttgatttaaatagaagtgatgaaaataaagcttggcccaaaatggaattctttctattttggtttgaagggaacaataggctggaaacagaaaagaagagctttgaagcacctggtcctaatgcttgcagtaggcctttattagatgtcataaacagaatgatgcattcctcgatgaaggacttacagcccacagaagtggaggtaaaatggaggacaaagagtcctgctaaaacaatatggttaaatggtccctttcaatcaaacgctgtttattaaaggcagaaatcttaataaccttatggagatgtgttcagtcttctaattttatacacgactgcccttccttttccaagctaaacctttccactggatttgaaccctgaatgacatcttgcagggggaccaccggaagtcagctcgctaattgacaaacatgctgtgagagaaaggagacatctttgtatttttattttgttcgaggaaagttagaaggctcagggacccctctccagagtcggtggagttagaaattcctgtgagctgcctagccagaggaccacaaaggtaatttcggccatcggaaactgttttaaaatcaggtctgttttgcatttaaaaagataaaagaatgttttctaaaatgacaattgctggttggccatcgattcagagctttaatctcatagccggctcaaatttcccattatgtctcaccgaggcttagaaggctcgagaggccgaactatggcctccgacaaaagtggaggggggttgcagcattaagaaacacagctgttgctcgcaaactgcaaatgttagaataactcactgcttgttttttccttgctgctaataaaaacttaaagtgttttgcatgctttctataaacagtgcacttaagttttataatcgagtacatcttattaagcgtgaagtctgctgatacttaaattattcataacgtggtccagactgattaagattggcttgttaaggagcacgagaagcaattaaactgacaaggcagtgcggccttgatgtatacatttattatcacaagaatacccaaagtgaatgcccttattaagcaatgaatttcacctcactggccttccaccacggctgccacgggcagggagagcgaggaacaacatgtcaaaagctaactctgaggaaatgcctatcttcaagtgaaaccgattttgtaatgaacctttcagttggctcctgaggtaataaatcctgactggtgcattaattacttgataacatcccatcaaaatgcaaatactgcacttgagccataggaatggctcactggctggtaactcttcagggtggacataaattgtctgttttctcttatcaaacagggcgtttatttccatcttgctggggtgaatgtcactcctgcccccctcagcccctctgtggcctgacaccatcatttgcgaaggactgtcaacatcctaatggtgcgactctttcacttggtacctttctggagaagctgcccctcccccctgccccttggaccctccttcccctcccctccacacacactctctctctctctctctctgaaggaatccaaggtgtcaaggacaaacagcatcagtgttacaaagcataacctccacctttacaacacactagtctctctcttattttttctctttgagctaacaagccaaaccaggaatttcatttcttgcaatgatcgtggaaaaacgagatgaaccctggatgtccagaagcagggggtctacttaggaagttcccagacaaggccagggcttcctaggtagcacagtggtgaagaatccacctgccagtgcaggagacgcgggaaacatgggttctatccctaggttgggaagacttcctggaggagaaggtggcaacccgatccagtattcttgcctagaaaattccatggacagaggagcctggctgactacagtccacgggattacaaagactgagcaagtgagcacacggcactcactgagcaagaccagaaaatgtttcctgcaccaacatgcaccacgacaacaaagcatttctagatggtgttttcatatttcccccaaataatcaatacttcattaaagaaacagaaatgctccactctaggcctaagagatagagaaataagagtgacgagtcaaaaccaggcttaataaacacttgacaatgtgtgagagaggctcctgttcctgagtgttctcttagcctagcgaaacagatttatttagttatggaaactgtttccacaatgaatgttaatgaggatttgtgttttctattggctccttcgaaattctcatctccatcaataggtctgacgctcccacctgggtcaacatgcctcccagtagtgtttatttgtctcgaaggctcggtgaaaatccttaattcaggttactaggcaaccctacaggtgagaaaatataatgtttggctgactccatttttgaatgcacacggtggcctaatgccttcgaaatagactgcaaagcatgtgctgatcattctcggctacattctctaaaggcgaggtcagaagaaaattaattgatgctgaaaataatgacaggaggagaggcaccactgagacttggtgtgactggcatgtgataatgttagcaagaatctcagcatgtgactggacagtgtgatgaaaaatataccctgtgcgagggaaaaacaagttacaaaacttaattagtttttgacacttcttcataagttattatcttttcatttggaacattgccttgggacatcaatacacaagaagaaatgaaacattcttattgtaaatatgaaagaaagatgactttataccgggcctctcctctttacatgcccttttgaataaacaaaatatcctctgcaggcgaaaggatatctgagggtagatgatgcaaatgtttctgctctgagcttgacaccgtctgagtcgatgtatgattccattacgatggattatgcaattttgatgtgaaaaaaagaaggtggcatccgaattaaatgtggtcaaaataaggctcttagatgggaagtcgtcaaattatatccctgcttgcaataatgcttcctgtacagcaaatgtatttttaattcctttccactaaggtttatacctagaagtaattcacactgattactaaataacccttgtgagttgctttgtcttttgaattttaaaaaatacacttgccgtgagcaatgaatttcataaaccagcagctctcatgcttgatgaatcattcttattttatgcagtgctgtgtgatagagaacggagataaaatattctatccacaagctattcggtacaatttatcatcagcggctcactagcccagtgataatacctggcttgcagattgtaatgatcagattctgtttttatttcaaacaggagcaattccgaataccagagtttttaatttacatacattagtgaggttcaaatgtggcaatagctacaagcaaattcacttgcaaactgaatgctcgccttgcataatgggttccctttagcaattattcaccagtgaagtaccaagataaaaatgaaaacaaagagaaaaaggaaaatcatgatacgtacaccatcgtgtggactaggataattactgaaccacagtgaaggtcacgtttatatctgttttagtaatgatttcatgtacccttcttctgtattgaattcctaatgcaatcttctttccattttatggcaccatcgtctcttttatctgtaagttttttaaagcttcaatgctagcttcctatcatacaaaaatggcaatggcattattaatagagattattactgatattttaaatgataaaatatggaagcatctgctaaacacagtaatcacacatgcacacacaactccacaaatataccaagccaacatttagtaaaaccgacaggcttataataaaatacctcttatggttacatcacttttacactgaccacagtattgagcttgaattcccagcagcatcattactagacattttctgccacctttctaaatctgaaaagcttcctacatttagtgaagattaggtaatgctacacccaatcaatagcagctatcaattccataccttgttcagcagaacaagctgatcaaagtaagtaaaaaggctgactaaatattgtttaagactaggtgattcttaaaactaatctgtagttttgagaaaatatactcttcgcagagagaaacaaacgctaaaatgacaacatatacaatgaaactggcgcatctgctgtctttattccataatattatggaaaacccagtatagagtcccaagtgtagaataggagcttcgtgtttattcggcatttccacagtccggatcatttatatcatgatcttatggttatgtaaatggagtctcattttaggtttatcagcggctttctaaaaatgcctgtttgattatcagagatcaatactattctaatgaaatcctaacactatttctggggggaaaaaaaaagtcatttccaaattcatgctttaggcccaacagagtcagtgttcaatttctagacgagtaaattgtgtaaaaaccactgacacacctcctaggacaagccacgttcccaagacacagagggattgaacggacgacaaaaacagttggtctggttaatctcttggtgctgcccaaaaggtggagaagctgtggtcagagtggtttctggttgctgcctcatataacagtcctagatttggccacttgaaatgagaggaggctcaatctttttttccccactgttatcaagatgcagtcacacattgtctatacatggaaaatactagcttttattagaatcactcagtgaaccagtgcaaggagtcataagaagatgggtaggaagagaaatcagaaactgggggaaaaaaaaaaaacccactctatatttataatgctttacagtgtggtgaaatagtctgctctttcccttcctagttacggaaacattatcagtaggagtggcagtaactcttctttgaaaagttacattggacactttaggtttgcagacgtacccagggttctggttttgaaactctccagggtagtgtggttaaacaattacagttggcactcattcttccaggcagcactcagccactgaaggatgagggtgtatttgtttaaccagtgctgctgctcatccttgtcagcccaaagcccagctgaaggcatgggggtcgtgggaattcagaatgcaggacaaagctggccatacagttgaacagcccaaggacagggcttgatccctatcggacgatacatctataatgaaggatcaaaaatacagatttcattgttacactagagagtttccctaaagtgaacttcctcgaagttatcctacagtgttgatgttcagtcgctcagtcatggccaactcttcgagaccccatggactgtagcacacccagcttccctgtccttcaccgtctccaggagttttctcaaactcatgtccattgagtcagtgatgccgtccagccatctcatcctgtcatccccttctcctcctgccttcaatactatagtgaaaaaaccccaatttgtattaagtgtgtattaagttgtttagtcgctgagttgtatccaactctttgcaaccccatggactgtagcccaccaggctcctctgtccatgggatttcccaggcaacaatactggatcaggttgacactttctactccaggggatcttcccaatccagggattgcacccatgtctcctgtatctgctgcactggcaggtggattctttaccactgaaccacccagaagccctgtattaagtatattcacacatacacacacacacacacacacatacagatcaactgtgtcttctctatggttaaatgatgtaatttctataaatatagcgtatatgatattcaattatataatataaagtgatgtaatttctatgaaatctctatagttttcaaattcattttcattatgtcctgataaaatcttccctttcaagtcaattgctacactcgcctatcctacctaacctttaatagattttccctgactttgataagtccacagcatttccaaatatcctcggtgtaagttagcatttatctccatcttcaagcaacaaaaaccctagaggacctttcccaacccaccactcaattctttgaatccctccttttctaaaagtttccatacttgtgctcaaatggtcggttttattagttttcacagtaagacttagcccttagtgtgtactccataaaaattgaacaaaaggctttaaaactaacaaaacaaacaagttagataacctgtgatgaatttgaatggcagtaacccagggtagaagggatgaattggaagtttggaactgtcacatacacactgctgctactgctgctaagtcgcttcagtcgtgtcctactctgtgcgaccccatggacagcagcccttgaggctcccccgtccctgggattctccaggcaagaacactggagtgggttgccatttccttctccaatgcaagaaagtgaaaagtgaaagtgaagatgctcagtcgtgtctgactcttagcaaccccatggactgcagcctgccaggctcctctgtccatggggttttccaggcaagagtactggagtggggtgccattgccttctccccacatacacactagtactatatttaaaacagataaccagcaaggacctgctgctgtgtagtgcagggagctctactcagtattctgtaataacttaaatgggaaagaatttgaaaaagaataaatacatgcatcactgagtcactttgctacacacctgaaactgacacaacactgtcaatcaactaaactccaacataagataaaaagtgttataagaagaaaatgtcaataataaaagcagttaatacttattctttttaaaaaggcagtaaccagtacttatttaaatatttgaattaggactcccctagtgctcgagtggttaaccactctgtgcttccaatgcaggaagcacaggattgattcctggatggggaactaagctcccacatgctgcatggtgtggccaaaaaagaaaaactatgtaaaaaaacaacaaccaaaaatccttgaattacttttgttgttaagattaagaaggcctaaaattaatcattcttttctgtggtagctacttcacttttttctacattgtcaactgaaagaagagtgtactttgcaaactcagatttccactggtttgtatgcaatgatttgttcttctactatcaggtgagattacagtggatgctgcactcaacagctggaatgcatcttgagttccggttttcctcagagttgaaggcactgctgaagtgactggggacggggagctgcggagcgaggggcggggcgtggggcgggggcggggtgcggggagggggcggggcacgggagggggcgtggagaaggcaactctgtacttgagtctctcctcgcaggctgacagctgggccggtgacagcaggatggtgaaaatgtctgtgatgatgggcttcaacttgggacagccttgatttatccattaaaaaggaagaatgacagaacagcaattctctccagctctttccattttaaaaagatttgaagaaatttggtaaaattgcttttttgtttgtttattacccaatcacatgaaatgtatttctaaaacactctctttaagtagaactactaatctacatttaattctgagtggatggtttttgatacttagcttacgctagaaatttggttcaaaaaaaaactggagagtgttaagactaatgagaaagaacaatcatggtctcctataaaaacatttttcccatttgattttatcatctagggtgtaagagaggagtttattgatctcattgctgctcatgtgttctaaggaccaaatttgtcatttaacaacaggggtatacagcgccatgcagcaggggaaatctgtgaccacagaaaaacttctccaaatgagagctgactcattggaaaagaccctgatgctgggaaaggttaagggcaggaggagaagggggcaggagatgatgagatggttagatagaattactgactcaatggacatgaatctgagcaaattttgggcgacagtggaggacagaggagcctggcatgctgcaggccattgggtcacaaagagtcagacacgacttagcaactaaacaacaaacattttcttagattctgtacacgagaacctcttcttacatatagcaagtatggaaacgtcttctgagaatagcatccaacacaaaacctgtctacacagcaagaacaacaacaacaacaacaaaactctattttttcagttgacaatttgagaatatgtgtatttatcctttatcactgcagaatattctaaccttctaccaaaattattcccaactcaagaaatgatcattaaatattaatagaagtacttaaattgtatctttccatgccaatttcagtcccatgtaaatatttataactcagccttaaacattggaaatgctgtgctcctaatagaagtaacagccatcactataataggggataaacttctgtgaaagtaaaaacacaaaatgcttaaaatgctagttgtgtttatgacttggaaaagaaggttccagtgggcatcaggtcaagttttcctatttaagaggatcaattttaagtggagtgcattaattacttcaacagtgacttttaaagagctttcctaatcaaaatagtctcatgtactccaaagtatcaccactattttctccctatttatggcttttctttgtcaggtatacagttagttgatacttcagtagtgatgatcttaatactaccatcaaacttattgtttaaaaataaaaagtaaagtaaagagaaggaataagggacaaaatgaaactaggtcaatctttttaagtctttttacctgggaattcttaaagtccaaaaaataatggcaaatatagtctcctaaattagtattttaggctttctggtcctagaaaaggtgagtaaattgaaatcatttttacagtggccatcatgcatctgaaagttcatctgttgtaattagacagggcccaaagcaaaagtatgtctattttttaagtgaaagtgaaagtgttagtcgctcagtcaagtctgcttctttgaatgcagggctgtagcccaccagcctcctctgtccataggattctagaggtatgaatactggagtgggttgtcatttcctcctccagggaatcttcctgactcagggattgaacctggacctcctgcattgcaggcagattctttaccctctgagccaccagatttcttaaaacaagtctgttttgtaaagatatgcacttgtggtgaagacttcactctgcttacaagttaaaatcaagtagagatttataatatcaaaatacttcatgtcactttaaaaatctgcacttgcagtaagaaaacgctctttaaaaatgtatcaccaacttcacaaacacacaggcacatattggatttatcagtaaaataattttaagtccatgtatttgagaaaatctatatggccccccagcctttttttttttttttaagccatctctacttcacccctaatcaaaggcagaagaaactctgaactgatccttggttggtaaccataattccttctcattctacgcttcacatgaggtggaagcagcagaataatgcctattgttattgtatggttacagtgccctgcgagtctggacaagttattaggtcagacactaacttcctaagtagaaaaatgatgtgttctcctttgtcctctcttcagtaatggctggagtcagtgctaattaaggccccgcagcaatgttcttccagagaggtcagggacttctttctgacacctaaacagtactcaactcaaaggaactgctcctaatctgaaatgatgtgatgtagagctggcctttcagattcagcgtatatttaaaggaaaataacagttaatggcaggggtgtcaaaaaaaaaaaaaagcagatggagaagatagaagtgtcactgggtggctaagtttaccttcaattcctgactccacttacagaccagtagacaatagagccctggacaccttgttacgcccttcctcatcctaaaatcttgggaagaagaaatttgcaccaggcacaccctggagacagatcacctatgacaaaccaaagaactgtttgcttaaggactatactgtatgctggatcctcttttcaccaagaaccacatcatcttgtccaagggttttcagagagattcaatcgtaatctttattagtggttgtattcataatgacacaaatcataaattcacataaagcgaacactctgttaaatttcttattgggagtaagccatggtagtaattaatcttggagtcattttcttttgcccctggaggcacagaacttacaaaatcaaagtgatatttaagagaaaccaaggtttactatcagtgagttttaatagacatctgcactgattacaaattactccaaaaccgtaaaggatgttatcattaatacccttctcactgtattcttccctctccctcagtgagacacctgcatgccatgaattggcatgtatttatttcaggatttcttgtggcccttatattgtagaatcactgttcacgatggaatggctgagggtggaccagagctctagctgtagagcttcagttctgaagtatctgtagctgattctaaaaacttcttccaggtcaaataaatatatcagcttgccaccttcataactaagtccccaaatctcttgaaaaaatacaattcaagtatgaaaattatgtctgaggatttaaaggctccagtgattttatggttaaaaagtagactttaaaatcgtagaagttggagataatctacactccgaccttcattttacagatgaggaaatagaatctctgcgatgttagatgatttcccccagttaatagtaaggctaaaattaaatcctgttttctacgcactcatatagtggagtgatttttcttccttactctgccaccctgtcttccttcaaaagtttagtgctttatacaaagaaataaatgtcccaacattgaaatatagcaaaatatctataaaattatgtcctcaattttgttatgaaacagggttaccattacttataagtgtgctattaagctatatgtaagtgttcccatttatctaagcagttttctatatgagaatgcaaaccttctgcttgaaaacagaagaatgacaagagttttcccccccaggtttacttaaacatacaaggactaatggtgagttctaagccaccccaggagctacagagccaagtaactgcattcagacaccaaatgactaccatcagcaacttagggtgatctggattcaaagtgaagggaaaatgtataaagcaagattctcacaactctcgaaattcagacatacagctggctgatcaaaagatatcccaatgaatagcaaatagagaagatattttttgctcaaaaagaaagtgtgtggggatctttgtgtttgtgtgtgtgtttaaccaaacatattttcagtttgtttctgacttgtctttgtttttgcaaattggaataaaattttaagcaagagaacttgtctgaaatgttttgcttgaagaattctagtatgaaagagacaaccaaaaaaaaaccaaaacaactgcaaggcataggcctcctggcccctttaaaaattcttctctggttgagtggctgttactcaaccaaggaagaccccagtaacccatcctcctgtgttcacaggagactgaatggaaacgcaaacttcgcccctgggaaccgaaaaggtagcaggcttctgtaactgaattattccaccttgggaattttgctgctgaatttaaaatgtggctgtcctttacattacaaaaaagaaaaaaataagaaagaaagaaaactaccaactggccaagaaaaaggcaactaatgatatttgttcaacaagtgtccaaaacctggaaccagagatttatcccttttacagaagactaaacctgattcattagtaatgaaataaatattgtcagtgctttagttttataccttaagtatcaaagttttacttcaagttaacatttccttatatgggaaattttagagaaatgttgtatttgccaggaaagtctttattttttaatattggaatactttggtttgttaacttttaaataatatcatttttaataacaattcattatgtgacactggataacaattaagaatgcaggagctattttggataacaactctagtttcatcatttcccaactgtgtggctttgtcagattatttaatgtatgtgcctttgcttcctaggttgaaaaacagatataatgataacttgccctcatttgtctgtgatgatgttaaatgagttaagacatataaagtacatcacagtgcttgatacagagtagcaattaataaattattttaacttttattgcaaattttactttcttaatcacttaattatacataagtaacttataaaaatacatccagatatacagaacaactttcccaggtttttcagcatgcaaatataaataagtaactcatctggacaattcatattatatagtaatgaggaagagaatctttgagaagatgctggtatgtcatacgaaatcaaatctaaaacaaagtcaagcaaatattatattctaagtaaaatacaaatgcttatttacacagtaaactgtaaagtctcaaaagatgcagttgtgcattaggatttgaaaaattatttttctaaatgcatatgaacatatatttacatatttctatgacaggctacaaagacactaatggaacagtctattatttctaaaataatttaacactattttcagttccattaatagcctagaaattaaacttctaaaaccttacacaaacaaatcaagataattccaatctcaaatccacaaattgaaatggagatttggtaattatctaagtaatttgattaatggagatgaataaactagatgatggtgacccatgtatctgtgttggtcctgaaatgcttactttgactgtataaatcaatttaaactggttaaatgctaaatgtactgtcttcacagcacaaagtgaaaatgagattctgcagtcatttagttatctttattaacgcaggaagctaaaaacaattgccttccatgatatgcacatgtttatttcctgacaaaatattgtttttgcataatacagatataatctaaggctcactcattattctcagtaattttgttctatgattccccattagagcacttcatacaaacgtttctttcaaattgctctattatgtcataatcaaaagacggattttagccaaaatgtttgtttaccatcttgcagatagtcaaaacagtctgttggtacactctttgatattcatttctgctcattcacggagtggatttttggccaaaacatctgattgctcttttgaggaattttacaatcgttatgtcggttgagtttaatatgagccaacagctatgcaataatggaagtcactgaatattgagccagctgatttctttgtctgtccacataatgaccaataaattctttggtcttaaattttccaggatacgaaattacacactggtatgaaataaatgtttcaatgaattattttattagcatgtatgatttaaccctcaaggccatgttgacaatacgctaaaagaatccatctgatcaggtcagtcaaaaaataagcagcacagtaacaacgatcaggctaaataatttactcagtgtggtccaaacccagaacctcacatttaagagtttgtttttctccttggatacaaagaaccaaaaatctagctcttgctaataaaatgagattacttaatttgatagtatacagttcacctgataagggactttgggcagcactgatttggaagaaatgcagtttcaactagtcagttctcataggtctccaggctcccaaagtgccatttcagtatccgaagtccacctaagcagaactaacctagaaaccattaccattaatccaccagagtccctactatacactggacactgtaaaacaggggtccccaacttctgggatctaatgcctgatgatctgaggtggagctgatgtaataatagaaatgaaatgcacaataaatgtaatgtgcttgaatcatcctgaaactactcccccaccccagtctgtggaagaattatcttccccgaaactattccctggctatccaaaaaggtagggggaccgctgctgtagaagatatgttagaagcaggaaatatattcaaagacattggaatccaaactgagagccaagaatcaaactagagtgtacaaactaacatgaatacaattctggtgcgtgcgtctacgtgctaagtcgcttcagtcatgtttgactctttgcaactttatggactatacagcctgtcaggctctgtctgtccatgggattctccagacaagaatactggagtgggttgtcatgccctcctccagagggtcttccagggcccaaggatcaaaccctcatctcttatgtctcctgcactcgctggtgggttcttaccactagtaccacctgggaagcccctacaattcaggggggaaggataaatcaagaatttggaattaaactatacataccactacatataaaatagataaccatcaaggactgtatagcacagggaactatactcaatatcttctaataacatataatggaaaataatctaaatatatatatacacacacatatatataaaatatataaatgaatcactttgctgaatatctgaaaataacacattataaatcgactgtatttcaataaaaattttttaaaagaataaaattcaacatgtaattggatgttaagttgtatgatacaattatcagacaagatcactgatgagagatatacatcaattcaggttgcaattatgaggaaagggggaacaaatgctagcttacaaaaagatacagagaactgcgcaagaaggaagcaatgatgcttctggaaatatggactatacggtgaagaatatgagaagagtgtagcacatggttcatttttggaaagatttttttctaactggggaagaccatattactgtccaacctaatattcctttaataataagattccaaactccttaggtcttcatgagctctgagagttactacttgtgtaaactcagcctagttatttcatctgcagatgccctcaatatcctgatttgtaaaataagaaatataatggtaccccttgcttaccgctactgtaagaataattgagcttcctggtgttaagtatcttaaatagtgatgggcctatagaggttgcttagtaaaagtttgctctcatcaatatcctcctcctcattagtattaatcagtaattagcttttctaagcctgacacactttcaattatattttccagtcttgtttcctaatcttggacactttatttcagccaaactgcactactgacatttccagcacatcctttggttttcaaactcggagtcttcatgttttacttcatctggagtatcattaaccagccatttctttctcctattgagatcttgcctttatttcaaggctctctcatcctgggtgtctgtgttctcagagctgtttttacccatcttataacacttgatcacattcatcagagttcctccttaaaccaggggtccccaacctccaggccatggaccagtacctcctgtcagatcagtagcagcattagattagaaataaagggcacaataagtgtgtaatgtgtttgaaacatctcaaccccacccaccctgctccagaccgtggagaaactgtcttccacaaaactggatcctgatgccaaaaaggttggggaccactgccttaaactataaatttctgggatataaagacatttttggtaggcatttcacccaatagtatgccaataagagtcagtgaaatttttgctgaatcaaatcaatgcaaaacagttaaaacataggatgtgcatggtatgctaagtttcctcagtcacgtccaactttttgcgaccatgtatactgtagcccatcaggctcctctgtccatagaattctccaggcaagaacactagagtgggttgtcatgccctcttccaggggatcttccccacccaaggatccaacctgtgtctcttaggtctcctgcactggcaggtgagttctttaccactagcgccacctgggaagtcccaaaatacaggatacagagtgtgaatgtatacagttattatgctatttataagaaaacagactgtctaaccctgaatcaatagatcttgactctccatctatagcaaataaataagttgttcatttgatctccccagaaaatgatagcattactgcaatgtttggttgctgccaataaattttatgctttgacaagcctttcttcatcatggtaaacaaacaccccacccttaaaagtgttgtgaacaatgacaaactcttgccatgatgtttctgattttcaaactgcaatttgatccctgcccataattgcacctacagaaatgcaattatccagatttttttggtctttttgtactttgatcagattattagctgttgcatgaaatttagctagagaatgatagtatattatcctctacatttcattttattaggatttagctattaggagatactaaaacaaaacttcaggacactataaattctaaaagatagcactattaaaatactgacactttcaagatttggcactttgctatgtctactatttattatattatactacctagaacctagaggtgtctgtcttttcaaaactaatagcctcaaaaaaattccactgaataacgtgttgtaagctcacatgatctctttaccaaaatactcaaaaagtaaaattcatgatcagcaattatgacttcacatcaggtatgcatatgaaactattctgtatgtggttaataatttttccagatgaaaatgatagccagtggaggaaaagaaagagaatgacaaacagaacttttgtcattgattgcacataatgggggattatcatagaaatgctttctattttttcttaagatcagtctcaaaatgtctgatctttacctatagagtattattttccagagtatagttaaaagcacggatcctggagtcagactgctttccaaaccccagccacattactggtagaacagagctatgtaaactgaaaatatacttgacctcacaaagcctcagtttccttgtttgtgaaatagtaatactaatagtatctacaatatagtattgttgaagaaataaataagttgaagaaatcaacggccaacaaagattcgcttttgcttttattctcagtgaacccattcagattcagaatcaaaatctgaattgatttattggcaatagataaccaatttagtactgaaggacatacactagaggacattcaagctaaataaccatttgcatagaactattcacataattgagaaaaacatgccaccttagtctaaactctttgaatgattgcctcaattctccacctcacttggcatctatagacaaggtcttcatgtccagtatccactgaaagtttctgtatttcaaataaaaataatagttgccgtcaagtatgttaatgtccataatcattgtaatttttgtaaattataactgtcagtggtcacaaacctacccaatgaaaacataaggtaacaatttagcctttctattactactctcagaaaagaagagccacttgtaggaaacttaagaaggaaggcaaatttataacatttattctaaaaataggggatctttttcccctctcccagtgggattatttctaaggtaatatttgctagaaaatatctgcagacaaaattttaccactgcttttaattttcattacagagtgatgatacacagtgctactttagcttcggtagacaacatttaaagaatatgcttgaaatatctaggtgtattatagttaatgtaaataaaattatatttttggttccaatgattaaaaaatatgtttgtttatactctgcttttatggttttaaaatttcataaaaatttctccaaataaaatacagtactcaatttaaatattagcatttattagaaatgagatctacatgctattaactatatgttatatattcatatttattttattgaactctgtcattttcatgacacaaactctgatcaaggaaaagaatataagataaaccaattagaaaatatattgtcacactgttaaattggggatggtctcagggaaaagtaggaacacaaggaaattcagttattttattgcatttaaatataatacaaatattttatgaattttttgaaataataattctcagtatgcttaaaattggacatttaaaggatgctattttttgttaattacatgttgcttggatgcttaaattaagtcaaagactttaagtctaaaggtaaccctgccatgtttctaactgtcctcaaaataattacagagtggagcctgactgtcactcatgggtatctagtccattgtgtgaggagaaaaagaaaatggcggctcacgcattagcacatcacccatggctagagcaatgacaagacagattaggatgtatattaaatctcacacatgactgcttttctgtatcaaggtaaaaaatccttgctcttacatacattagggaccagtgttagtctgacatctatattaatattgacagtatatcaacattcttttttacatttactgagtcaataactagtctaaacctggtaaaacttagataacagaaatgaaaaaaaaatctagcaggcagtcttatattctcatatctaaaaaaattcacccccctcaaagtactgggcttttatgaattatcaatccttcagcaatacatcaactggcatacacagctgtgactcagtaatccaatctcatttatcaaaaaaagaaatttggtagataaagaatggttctagaagcagaaactcctgcacagacaataacatggatattatatgcataggggacattattttaaaaagctagattaatgccattgtattgattcaccttctgtacattattttcacagataagaagacattgttaggcagtaaccctgcttccaaaataaccagagttgagaaatacacatggtacttacaaaaataggaaataatcaaattgcttaatttaagatttttaacatctttatctgtagtatatttatctgcatctaccaggttgagaatcagaagccccgtgtgaattggattagagaacggaagtcgttatttacattgtgttaaaatatcacaatactacacaaaaacctatcttcatttcaaggcaatatcttggtttcattaataattaaatgttgttttccaaagatggctactttacactctgctttgaagtatgttacctttactgttattttcaaagatacaataatgcttttaaggtgcacacatattttctatacattactcaagaatgcagcaaaataaaacattcactttttccagtcttagactagcttcaccatatcactgaatgaagagatacatatttttaaaaatcaatattatttttaaaaaagaaaacaagagcctgtattcttctaaagcttatattcaaatggttgacatttcaattttagtaactaagttgtggttggaagcaccatcattcaggaaaaatgaaatcatgaggcaatgaagcaaagttcttttgattttaaatgcatcatgcaataactcttcaagagtcactcatctccaaagtcaggtaagcttttattaaaacatgcctttgataaaaactacctttctcctttttccagcactctgtggaagatgactcgggttaaagtgatgttcttagtaataattatctctataagatccatgctatcatttatgtaagtccttgaaaatgatgccattttgtgcgaccgggacaaaattgcgaccatgattataaacccttccatcaggcaaccccactggcaaacaatggcaggaataagaggcctttctgtgctcttccaccaatgccgccctagactctgctagcaagatgtacgtaaaagaaaagatgtacagaaatactggcataggagagtaacttgcactctaatgctttgagatgtttacagtgttaaagctgcttaattatcaatagaggccctgaaaaagttaaaggagtattttaactagcaataaaactatcatgattaccagaaattctgtccttcactggaggttgtttttatgctcaacaaaatgatgtgaaattaactattttcatcaacagatggtctgtaggataatggcttgtactttttaatttcctttttggcagtacatcatgccaaatgttagcaatgtcaatagtcttcattagaagttgtctgatattgttgggatgttttgtacagacactattttccccccagtattagaaatggaaatcagagaagtttaaggagtacagaaagataaaaaaaatttaatatacttaagtgaagggaaaaggaatctatttcaaattctaagattaaaaatttaaggtttagagtttttattatttcttttcatctccacagcattgctgtaattcagaaaccagtaatctttactctcacaaaaaacatcttttgtccctaacccttattcttaacaaggggtaagtgatgccccatttataacagttttcaattcatagagtccacatgtggccgtgtactagcatagccagacagagtgtacatttcaaaaaaactaaacctcataaatctccagaaattcctcacatctattatgtttaccttctgctgctgatgagcctgttgggctctgtacagaggaaattacaagcgctccagaagatttggcaagaagatgctagaagaaacaatgggcaaaaaaaaaaaaaaaaaaaaaattcttaactgaagcatcatatccagctttggctaccatttacatatttgagattactagctagtaaagtggaaattccactgaaatggaataaattgttttctgaaatccctatctgattattgttggtgatgtctgaaattaaacattttaagctacactcaatacactgtatggaattcaactgaaggctaacattcttattgaaaatctgcctgtttatgcagttttccaattaagaatcaaagtatttgtatctacctggaacttttgcttctagccttgtgatcacttttgtattaatctctattatccaataaatctttatttattagatatttggaggctgttgtaatagctgctatctagtaagaaaatgccagttgaaatattttatattcacacatttaaataccactggaaataagcttaaatttgatgccaagggaaatgcttatgcctaagacatgctgcagaatgttaagaactttgttaaatcaaaaaatattccaccaaaattatgtatacacaatgcaaacacaatcaaagttttaaaaagtacaagtaaaaaatagcctaaccactatgctggcctttttttctttactcattctaaatatcaattttcctactaagttgactggttatcctgaagacacaattttataatccatataagaaaatgttcttaaagaaagcttcattactcttgtgtttgaagatgacttaatttgtatgcttcaattttactaaacatgtcattgctattggctattacattttattcattataaggaaaagatgaataagaatatgaatttaaaaaaagaataagaatgtgcagatccatttaacaggaatcactcttgaaataaagttggaggtaaaactactcctaaagaacaaatagaagaaaatgaaataaaatggaaccacaggatgaagatcaggtgtctatgattccccacaaaaagcaaaaaaaaaaaaaaaaaaaaaaaaaatcacagtttatgtatcttaccaaaaagagaaatcataaagtcatcagttaacctcaaccacataacctgtcaaatcagcaaatacttccatatttatcagttatgggcccaatcacttgtctgatatactaaccattcatctccccttgcaccattcccctagtccttaaaccatcctcaaataggtaaaccaaggtcctgtaagagctatctcccactaaagaaatacatttcattattgtgaaaccaaatctattacttaagaaacttaatatgaatgtctcccacttccgattggaaggaagccaataggattgatccaatgccttccacagaatgtcacagatgcttattgccaataaactgtcccttcagttttgctctttcctctggaatatagtctacctttaactctatctacaaagagtatttttgaaactcataatatctattcttatctctttgaaaatcactacagtgcctttacaaggtttagccccacatgcctttagaattatttggcatttagccaaaacagagctcgagacggctagataagagccaacggttaaaaagaaattagaaaaaaaatttttttcattctaatgaataaaaactgctaaaccaagaagcgttagcaagggacttataaaagatatggcataggttattaaaacaccatccttattacaagaatttttcctcactgatatcatttactttatcgactgagttaacctctttcgtgcactccttcctgacttttctaccaccactgggtagaagctggaggctgactcatgactggagtccaggcagactgagaaaattaattggacaggctttgcggatgtgtcacattttgatagagagctttaccttcccagtaagtaattttaatcacattgtaagacaatcaaaaaataagagtttgacagtcagtacaggcaaattaaaagagtttacctttagcttacactacaggtaaaggttggcatactgaactctccagctggctaccatgattttctgatcttgacactctgatttttcaatcacgagcaaaactcactaaagaccaatgattagtttactctctttcacttttttctttcaccatattcacgcccttggtggataactgtttgaatatatctcattgcttatggttcttaactcaaaattattttcatatagcatgccttagtaaaaatgttcttacccaagcacagttagaggctccctaagactacggttttatgctaacaccgttagactattggtgattaattaacatcaaggaactgctaaactgcagtaaaataaaaatgaaaacgcacatatgaaatatctttataggctcatgattgctggtctctgcagagaaactggtggcacccagcccagtagtgccagacctccttacaccactacataaaatttgaaataagaagggggggaggaagaaatgtctcaataaaaattatagttccaagtgaagaatacaatgattagttcagtattagcagttaattagagcgccattttcatttttatggatgacttttgctggagcagttcagcaaggtttatcacatgactaaaaagggttacaggtaatggagtgtcctcccgggcttaggactatattttctttcattgataccgatttgatctcccaactggtctacagtagataagaacgctcacttgagaaaggtgaccttgaggctgctcacccgacctgtctaaacttgactttgaagttcccaaccactaattcaagtatatttttaacactggtatatttataaaggtgtactcagtaaatatgtctcctgacagatttaaaacaccacctaggtttgccaaaaggaagaaaaaaaaaaggaaaacggactttttaaatacataataatgatttatctaaataggcttttttatgcacccaaaccctgaaccacctttgatccatttataattaaagccaaaagtacagccgtctcatttaattccaatatgggtagttttaatgcataaagtttcgcatgtggtttttagctcacgaccatctgtttctggatttcatatataaacaggacactttagggaacagagattaattcagttttggaatgccattcaaaacgtgttagctgtttccctgcgccaggtcaaccaaagcaaaaacaagttaagcgctcattttgcaaagtagcattaacattggaattattgtataatggaccctgactaggtcttatgttttaaattactggtctctctcaaataaaactattaatctttttttgtctcagaatgttttacagtcctgttacacttattagctgctggcagcaaagaaacttttaaatgaaagccaaattgctttggtcatgagaaaggaaattaaagctcactctggggggaaaaatttcactgtgagatcctcccaaggtagggtttcataacctcctgcatgcctgctaaagatgtcaccgcatgcaggaccgcgtatggtactgatataaaaagaaagctttaatgggaacaacatgttcatttctgagagattaagagctgccgtgttttacactgggggacaggctcgagttggagagtctgaggcgtgtgtgtgtctgtgtgtgtgtgtgtgtgtgtgtaatgaagtggcgtggagcgaggctcagagacagccctctgcagggtactcaccaagctcatttggtgggcagtcttttacaaaaaagatctcattgaggttgtcttcctctggggccaggccttgttggtgaagctggagtttccgtaggccctcagtctgctggtgcttcactgatcggacgtgctgtaccaggttcaacttgaccttggtggagtaatcgcatacggcacagtagtaatagcaggattcaggatttaccgtaccctcttgcttctgcaagtgctgtaagaaggggaagtctcatgagaagggtgctttcactccctggaggatgacaagacagcactcatcccccacccatggcaagacacaacagttacacagatgctagaatcagtccttcttgtaagaggccaccctacttttgaaaagtgaattgatctcatgaagatgaatttaaaataagctgaaaacctgatggaatgaagactagctgtatagtgtccctcctaataagaagtatttatcaattggtacacccaaagcaaatcaagtctttttacctatctagttaactagttaccacaggaagaaaaacaagttcatcaaggtatgagaatacctgggtaattaggttgacatgaatgaggtacttcctgatgtttaaatgctaaacaaagttaataccaaaaccttaaccataagctgaaatccacaaattgcatggtatttggtattttctagatgagaatggtttcaggtttaattaatattttagtgtagcacaaactagaaaccaaaacaatctgggaatatttcagctgagccctctgtgatagaggttactttgttacaaatactgactcaaacataaatgtttatttaaattttccataaatctgcatgcatggaataaacttacattttctataaacaaaaatgtttctcttaattatatgttagatacactaaaaagttaagtaacttaatttgaagtttaatctaattcaaaacagacactatgatgtgaagctttttcttttttaccattcacagtgacccgcaacaaatttttgctaaaaaaaaatctgttttcgcaagccctgctgactctgatttctgcccacagcatgtaacaggatcctctgaaattctgattttttcaatggaaaaacttttacaactcccaaacatattctgttacagtagtttattttttaaaaaaacttttctcccattttaattggagtggttctattccatacaaacaagcaaactccccgaataagaaaagcaaggaagaggaggaatattaataactgtgattcaatataaactatgagttttagtaatttattaaaatatttttatgtgcttcttttaaaaatacataaatgggcacaggtggtatttatttggtcttagattagttggataagggttagcattctgaaattcaaacaaacaacaaaaaaaaacttcatacacaggatcaaacatgttgattcctaccttccctcccccacctctctcggttttcgcatctgaaaatggttagtacgaaaagaataactagctggtgagcctttccaaataccaaaagacaggacccatatattatatttggttaacgctcatggacagaagttttcgtattttttctttaatcgaaagaagttctgttctatagcgtcattccccaaatttttgtaaaaggttaagtttctgatcattcccagtcccacacaaagcagctcagcacagtgcctgtaagtgatagctcatcacctgcaaaaacaaatgttgcatcgtttagctccgcaaacaagacctggaagagtcaaaagatgagatttttgaatacctggagacaagcttttctttccttaggatggacacttacaaagatactcaagcctggatctaaacaggaacatgcctgtgcccgtcacaacacaccggcctcaattcgggtccaagagggaagagacaatccaggaattgaccttctcaagtcccagacaccgaccagatctgcctgaggccacaggaagcaggagggtgtgtgcccggagtctgcacggtggggtggtgggggtggtatttgctattataacttaccaaaacactttccagaggggaggggggagaaattaaactcttttttctcatgtaaatggaggacccatccactccaattggtattccactagtgccatttctaagatttcagtctttgatatatttattaataaataaatcaccccgcgattttctttcctgcacagtccgcctcttttccatgcctactgggaatccgtatgcttgttgattcgagtgaattaaaaatggcaccaagaaaaaggagcaagggctatttaacaacgtatttccttgtatctcaagtccgcgcagttgcacagaacctcgctccttgtcactccgctgttaagaacagcaggccacagccattcaggctgccccatcaactgtgagttttaatttgagccactttcacattaaaaaaaaggaaaaagaatcttactttttccgccaacccatctttaccccgtgttgcaccacctaaagctttcaggcgatgctctactccggatcaagccaagcatatcaagggtgcctgtaacactcacaggctaatgaacaatgcacaaaaacaaaaggaacagcaaggctcctattatctgatcttccgtaaaacacaaaaaacggcctgctctggtgcagaggaagtgccaggaagcctgcaggtgtgagccggttaaaagaaaaggcttgggctaaatagattctttgactgtcacggattagactcatggcccgagtggtaacacacatcttttcctttaatttacaaaattttctcacgcgtctgcaagagttcaccccatcaggggctttcggaggccattgaaacgtcttaagttttaattaagttggagttgtcagaagaaagcctttttggcacagagtcagggtcattaattactgctatctttgtttctttctgtaaagagaattctgatgacttgttgggttccttacccagcctacattttccaccctgcagttcccattcagttccaagtgggacttgattaagcagtttaccaattacttccatcagtgttaggtacaaagcatttacacaatcttaaatctttaaaaaagaaaaaaaagcatttctcattagtggtttagggaacagtattaataacaaattcatctagtaagtgatcaagcagctggattcttgcatgagtttttgcatttaaatataaatattctcacatttttcacatcattatctattcaactcccctattcatattctcacagcctgtgactttgcctttttaggcaatgctaatcaattttaaaattatttactttacctcataatacagaactctagctggaaacatccaattttgcctgctatcttttcaatcaggccagtgtttttattgtttctagataaaactgactgctactatcactgataatattttgtagatgcaaaaaagcaaaagttttagttggtttgttagtatgcttcatatacctctaaaataaatttgtagctatttggaccaagtatctacaccaatacaaatcttttagaattgattgtcatgtaaaaaaatttccaagttttaaaacactacacagacctaaatacaggttatacacatctaattacatatgtaaaagttaggaaatatcttttaataatttaaaaaatcatgaatttaaatcctgatatttatgggaaagcataatattttgaaaaaatttcctttgaagactctcctttagagtatatatttcgtatgtgtcccttagaaagattatgtatgagtttccctggtggctcagatggtaaagagtctgcctgcaatgcaggaggctagggttcaatccctgggtcaagaagagcacctgcagaagggaatggctactcactccagtgttcttgcctggagaatcccatggacttgagaagcctccatggcaggttacagtctctgcggtgcaaaaagtcaggcacaactgagcgattaacacttagaaagattatgcataatttgttattcttccatttcacagaaaaaaaaaatagcaaaagacattaagactcagaagtgagaatgaaattgaataactcattctctcagaaatcagcaaacctataaaatagggtaagtgtgaatcaagaaagatgtatttctattcactgatatggttagaattagtgtttgaacttagcaacatctattttaaaatctgaatgaaatgggtgggaaaagatttacaaacctgggcaaattcaattaccagaatcacccagttcttcttgatgaacctatgataccacttcattttttttccccagtaatctcatcatcacctgccatgattcacaataacagacgtgttaccaccaaatgtgtgccatttcagaccccgagctctgaatgccgtaatagcactcatcactataatgataataactcatcattatctgatgattctcagatgagaaacttctgagcccagaatttggactaggtttcagcgcagggaaagccaaaacaaccaatgctttcatttattcgggtccaaaaatgggttgctttggaagggataggaaaattcctggtttgactgaatagctgatgctgtcatgtcttacagataaaactatatatttattttgccattatactcttacttattaagcctgaaatgatgcacctggggaaaaaaaaagaggggtataattttcctctagtcatcaataaaagttctaaatgtcatttctaatccatagcaaaagatataaattcagaagtatagatgaaataaattagatcatcaaatgtaactacttggttcattttttaaaaatctaagttttctaaaaagtagtgaagtaatagtcttacatagaaaatttcaaagccaaatattaaagtgaaattcatcttccagggttaaacagttacagaatatacagaatatgaaggctccattctcccactcattgtttacacatcttttgtatcaccccagagaccatgacttataagactatgtttttcaccttcaaaccacttgtaaaagtgtgagaattaagtaagcacttaagaattgagtcaatgtccatggggtcgcaagagtcagacacgactgagcaacttcactttcacttttctgtttcatgcattggagaaggaaatggcaacccactccagtgttcttgcctggagaatcccaggaatggtggagcctgatgggctgctgtctatggggtcgcacagagtcggacacgactgaagtgacttagcagcagcagcaggaataatttaggagaaggcagtggcacccgcattccagtactcttgcctggaaaatcccatggacggagaagcctggtaggcttcagtccatggggtcactaagagtctgatatgactgagcgacttcactttcactttcatgcattggagaaggaaatggcaacccattccagtgtttttgcctggagaatcccagggacgggggagcctggtggctaccgtctatggggtcgcacagagtcagacacgactgaagtgacttagcagcagcagcagcagcaaacaatgatatatatgatagataaatcttaaactcagaactgaattaacttgctaaatataagtattgctaagtcgcttcagtcgtgtccgactccgtgcgaccccatagatggcagcccaccaggctccgccgtccctgggattctccaggcaagaacactggagtgggttgccatttccttctccagtgcgtgaaagtgaaaagtgaaagtgaagtcgctcagtcgcgtctgactctttgcgacctcatggactgcagcctaccaggctcctccgtccatgggattttccaggccagagtactggagtggggtgccattgccttatttacagatttagataataattctaggacatataacctcatctaataatgttatgaaccaattcagcccacccctggtttatctgaatctggagacctgggttcgatccttgggtcagggaagaccccatggggaagggactagcaacccactccagtattcttgcctggcaaatcccatggacagaggagcctggtgggctacagtccatgtgattgcaaggagtcggacacaactgagtgaccacactttctttctttcatctgactctagtctggatatagtatttctaaatatggctctttcctatattaaactttttctgggttgtctgagtgaacgtgaaatggttagttatgtggagtttggaaagttaatgggatccactttttaaccacgttcagttccacagacactgggtgtgcgcaccatggcaagcgttggacaaggtattaaagatacagaggaggctccgtatttccttaggaagctcatggcctcagaaaaacaaaatgaaccaccacagcctggtgcggtaaggtgtctctctggggagaaacagattgcgcagtaggtgaaaggtggcactggcaggtccacccaggattagccttgtagacagcaggtggaagggtagccgaggcagatggagcgatatgtgtgtcatgcctggaggtaacagaaaatgggacacattcgatacacttaaggacgtggcctgagaggtacatttggacagaatgtgaagtgcctggtatggcaggctaagactggactcagaactgaatgacctggggagtcgctgaaagttaagtgggaacgagacgggcttagtctttttggccatgcagcatatgggatcttcccctcaaagagggatcgaatcccatgccccctgcattgggaacatggagtcttaactactggatcaccagggaaatctgagatgggcttagtcttcatgcttcagaaagaccaatgcagcctcagcagacggggtgagcagtctggctgtatgtcccttaaaacagcgaggaagtagtgacatagctcatcactgttcctccacttggccactggcttttgccctaattctcctgaggtttcttctcagtctcccttatccaacattaatgtatctgtgcctcccagagtttagtactcatattcaggagattcccggatttcaatcgctaacccagatctcttttctgggatctaaattcatttcgtatgaataccatcttgacatatccctttggatgtcccacagcaaccaaaactcaaaaaccacaatgctaaatggattctccattttaatttgtcacctactctttcccatactaacttctgtcaagtccttttttatatactaggtaccattctaaatcacttatgtatgttctttgatccaatccccacaatatggcctcctacagagtaggtggggcttcccaaggtggctcagtggtaaagaatctgccttccaatgcaggagactcaagagacgtgggttcagtccctgggtcgggaaaatcccctggagaaggaaatggcaagccactccagtactcttgcctggaaaactgcatcaacagcagagcctagcaggctgaagttcacggggttgcaaacagtcagacatgactgagcacagggcacgcacagagtaggtactaatcttatcctacattgtagagatgcagaagtcaaggcaaacagaagttaattagtttgcccaaggtcatcatttgcctaatgttataatgtcagtgagagaggcagtcaggctgaacacctgtactcttcactatgacaccatattccttccccagtcatttctgttagtggcacctcagattcaaccagggacacattccagaaatctggaagtaatttttgatgcttcttctcccttaccacctgcatctcagcaccttcctaaatatacctcatatttctccatctatcaactttcctgcctgttccatttcaggccatcaactcttaacccttctattcaattcagacagtaatcacagcaccttgaaacagcagtctgattctgattcattcactcaacttataagacatctttgttatgtgtcatgcactgttctaagtgctgcaattgcagcagtgaataaaacaagtccctgccctcacagagcctaaagtcaagaatctaaaaagaaataaaactaacatgtaaatatatacattcaggcaatgattggcgctgtgaaggaaaacaaaacaggatagagtaggcagagtgggtaggaatggtggaagaaaatattattggagaagctaacctgataaattcacacaccaacttaacctccttcaatggttttcctttacttttatgataaaacctaaaatcattaacacgattctaaggtgaccatatggcaggcccttcccctatctcttccaatttaacatcatttgccccttcatttaaaaatatttcagctttgatgattaagtacacggtccttataccaaagccccacagtttgtcttcaacccaactggagctttggttcattcatcttccttacttgttcactttagtccaactattccagtttcagatcttgcaagtaaggctcattgaaagggtaaagcttccagaattccctctaccttcaatgctttcctccccattttgtcttactctcattcatcctctaagtcacagcttttcaatttaagggccttttttttttttcttaagaacctgtctgtttttcttcacctcttatactctggattttttctttagaacatttatcccattgacaattaaatagtaatatcattggttaatacgtatctgtcttctgcaccagattgaagctttttggtggtatggaatgactctttcttatgcattgtttgatttccagtaccttaataatgcccaatacataaccatatgctaagtaatatggtcagaaagaacagtgagacagaactagtggcaggcaagagagaaggacccaacagactgaagagttaatcaggacagaatattgaatagatcttcttgactgaatgactgaatacagtggagggcagtagaaagaagattaaatgtaactgcctgctttccccctagtctgggcaagtgaatggaagatgctgccatggacagagatgggagatacaatataatgaccagtgtggtgaaagagttatgctatattttagacaatgagatgtttagagagagatgattaatttgagaaagatgtgttttataacaatgatatttttaacagaacctgtctcaactcaggtccaagaaatcttcacaagctgtgaaagtgccagcaattcccattttcctggcagaaggataatttttaaaattcatagtctttattttgcccctccagcttcaattttggggaggcaagcatcaggtcactgtattgagatagcagcaggaggccaaggtccacacccacaggtttctgacctcacttttgattctacaaatggatatgctattcaaaagtagtttggggaaaaaaaaaaaagcatagaagacctaataagaggacagaagaaagtgtaatctgtgtaaaacattaaactttgggggtttatttggtgttatttaaatagtaatttttaagattttggctccatgcgcttttagtcagtacacactggtacgtatgataatggtatttgcaaatacaatgacatttccaaaaacaatgatatcaagagatccttgactccgaaagtagaatcaagccaaattgattcaatggaaaacctttcaaattctatgatagacaaaatgatatgccaggtatatgagatgatatcacaaatatgaaaacagtttcattctccatgtacaaaagtgatcatggatttgggaagagatcactctcattatccacctccctgggtttcctcacagtgttggacattgctgggtgcctcttctttcttgatatcccttcttttgacttcgttgaaaagctaagttcttatccttctggttgcttctgttttgtcttttttgctgtctcttcttctttatcttaatacaatagagatttttcacgtgtgctctctgtctttcaacagcaaatatctcctgttttatttcattttctctcatagattaatttatcttcttgctgcagaccactcacaaatcgagatacctaacgactccttctccctaaacacacaccatgcccctagcaacccaaaatgcatttcctcctagggtttcttcctttccttcaaactctacagtctacacataagttcatcactcttccttttaaacgtccctctgctcctcctttgtgccctctgtttccaataatacacaagagaaacatggtgtcatctcagacaccttctttccattcctgcccagggccttgaggaagctggaagtgtttacctgttcttataccatcttcatctttgtctttctctctgctccccctgtccctgccaaagctgtttatttctccctggaactattgtcatcatcccctaaatatcctgcttgacctacaatcacaagatgaacactgagtatcacggcctgtgggtgattatttattaccatttgtattatttctatatcatcgtatgccaatcctataatcaaaatctatcagtggcacactagtgtttatcagattcccaaatccttaacatatcattcaagatttcactctcctttcctgattattacattccttgccttaatgtgccagaaaaactgaactgttcacctttttaattaaataccttcaagctacttccttatctatgtgctgttgttcatattcttcctacttcctactctttccattttgctatatttacatatccagatcccacccattatttaaatccaatccaaatgttacctcaacgatacagccactatggaagttccttaaaaagctaaaaataagagttatcacatgatccagcaattccactcctggatatatatccagagaaaacaattcagaaagatacatgcacctccaagttcatagcagcactattttcaatagccaagacatggaagcaacctaaatgtccatcaacagatgaatggaaaagaagatgtggaacatatatacagtggaatattactcagcagtaaaacagaatgaaatatgccacttgcagcaacatggatggacctagagattttcatattagtgaagcaagtcagacagagaaggacaaatagcagatgatatcatttatacatggaacctaaaaaaaggatataaatgaacttatctacaaaacagaaatagattaacaggcacagaaaacaaacttatgattaccaaagtggaaggagggagggttaaattaggagtttggaattaaaatatgcacacttctatgtgtaaaatagataatcaacaggatctactgtatagcacagagaaacatagtcaatatctcacaataacctttaatggaaaaaatgcaaagaagaatatacatacaaaacactgaatcactttactatacccctgaaactaacagaacattgtaaattgactatagttcaataaaaattaaaaaacaaaaccaagtcacctcaacaaaaaagactttcttcaagcagaaatatccttgtcctcctttgaaccaaaaagcattctctctgaatccctcttctgatgtgtaacatttttttgctttattacacttacttacacacataccttatttactccaactgtgtgttctgcacaggctgtccagtccatttctacaaaatgtggtgctgggattcataatgacccatgtgcttccattcagaaaagtagttcatttttaacagcaacattgcatttttgaagaacaaagttttacagagagttcagagttcaattttgctctaccttcccctatctgtctttcagaagttaatcccttgaaggctttatttcttttgtcaagtgtggataatgttatcagtctcacatatttttaattagagtgagtcaggcaaacacacaaaccactctgtgacgatatctaataaatgttgccttgcttcctcttcccagtttaaagtccttcccaagaaggctatggtacccacgaacagtgatcttacaaagcaacaaagatgtgctcagaaacttccctgggtagtccaatggttaagaatacaccttccaatgcaggggacatgggtttgatccctggctgaggaactaagattccacatgcctaaaggcaactaaacctacccaacacaactactgagcctgtgtgttccagaccccatgtgccacaactagagagaagactgctcaccacaacaaagacccaaacagccagattaaaaaaactaaaaaatgtgctaagagaacaagagcatataagatttgggaatgaagaaggccagccaaccaggaggacccaagctctgtttcttagtcactgggacaaaattgaggaaaacacaaaggtttatagaaagaatttatctaaccccagatgccaacataatacaagtgataaatcctaaaggaaatcaatcctgaatattcattggacggactgatgctgaagttgaagctccaattctttggccacctgatgcaaacggctgactcattagaaaagaccctgatgttgggaaagattgaaggcaggaagagaaggggacaacagaggacgagatggttggatggcatcaccaactcgatggacatgagtttgagcaagctccaggagttggtcatgaacaggcaagcctggtgtactgcagcccatggggttataaagagttggacacaactgagcgactgaactgaatacaagtggtagggaagggattggaactaagttacactgcctggatatgagctgctgtaagatgctcttatgtcacctcagttaatccccattttactggtgtggaaactgaactcctatgatattaagacacttctgtcacctatcagtttataaagttgggatacaagcttaggacatgctgattcctaaactcccatcttgttcatacacacatacacagacacacacacagactcactcagccccttatgagagaaacagagagtgaaacaagggaactctgattctctgaaaagtctgtttttctgctgggttttgactgggagtaactgaggatgcataaggaaaagaaaactacattagtaaaacagctgtgttggtccaacagactgctgcagactcattgttgagaaaggaaaagttccattttcttgagagaataaattattcctttcactagcaatcgaatagcagtcaaaacaccttttggtacattcaaaaagaatttctaaagaattattataaaatgtttcaataaatcaatatttaaataaattgctgtcaaaattttctcttgagcattcttttacctgcaagcctccattctgtaccaaaaagaaaaaaggggaaaaataattagaaattttgctcttattttaaatccatagatccttgtaaggtctacaaatcccacaaaatattcattattgataacaagtaatatgcacattcaatattatccacagcccctggccacagaatgacaagtgttcttacttttcagtcagtaactgaaactggatatttcctcaaagaaaggttattcatatatttaagatgcatatgagataaaaataaaaactgtgcttctatgccattctatacatcactttaaatatacaagttgcagtaagtgttaaataattgttaattcatgaccatacaaaagtgttgatttaattaagctctcagcaacctcccaccacaaaatcatattaaaattgtagaaaagaaacactaaaatatttgtgagaaccagaattaagacattaaaggtgcttcctaacaaaaatctgaattacttgaataaaacttttgacatcaactggcctaaatgatctattttcaacctatcctttttaacatttgtttcacaagatttatagaaaatatggcagggctattatcacaatatggatcatttttcagagttccatcttatttgtgtctaatacttttaacactctttatgttctagccatttcttctatcactaagggatataagaaacatcagaaagatttcttgattcctcttggctctttaactgtggtcgtgccataatgttatgatatggatgaaagcatggtgcttcatcttagggcaccgaagatcagcagtatgatcttaaggcttcccaggtggctcattggtaaagattccacctgccaaagcaggagactcaagttcaattcctgggttgggaaaatcccttggagaaggaactggcaaaccactctagtatcttgcctgggaaaccccatggacagagggcccaggaaggggctacacagtccatgggagttgaaaagagttggacatgacttagtgactaaacaacaacaacaatatgatctgaagtaaattatttaaccactaaatctcagcgttttcttctttttattaagaactgtaataactggcccatgggatggtttggaagataaaataccaagtgtgtggtacctaacagtattgtggctgataatgcagcaagaacagaataatctgttctgttgcattttttatggcagtctaacttctggtatttcaattccttttaacgccacagatatccaataacaatataggaacactgacatcatgccacgtgtcaaactgtcagtgagttttgctcccatgtgacatagaagtgatttctgctgcgattatgttctatggtcgtttattagagaaggtaagttcatttcatgcaagatatatgtgcctatactataaaatattaatatttaagtaaaactacatttcaatatgtattacccaaattactaaaataggagcagacaccaaactatgctatgcaatgaattcattttaagaattttagcacatctaaaattttatatactcgaaaagtcttcatatagaaaaatgtgaggtttagttaacatttataatgattttttaaattgtagtttctgggagaactttgtacaaggatctattattgcatttaagtagtgtcttaaggtctaatttttatggtctattaagcataactctcaagcaccttaaacacaactaaatgaggtggaattactgttaacttgtattttaggttaccaagtgcccaggcaattccaaccaactatatccggaatggtattttatgacagctcatgactttctacattgagcttccttgacttaaaatttttacgagattgaaaactggcctctgagatggtgactaaaagttgggtcattagtactcaccttttaagaaataatgtctcagcaggctgtatttgaaccacttgagctcaaggaggtgttaacagagttgttaattaacccaggtctggaacctattgtgaagaattccagaaagctggaacaatagtgaggtagtgcttaacccacagtagggaagaaatgacttttgcttcaataatacagtcaaaaactttcataataaagatattaagtcaaaaaaagaatggcaacctgaaactaatggtcagaaattaggggcaaacttacactgccttcaagaaaaccagctggagtagaaatggacagagttggacagagtatcagtctttttggaacaatctccacctctgcacatgcatatgaatgcacagtaaaagaaacagcaaaatggcatctcttatatactcacgcctttgatcagatcaaggctttgcttaaatcatccaagatttaagaatccacaaggatagagatttcatggcttttcttggtaagcttcttctaatgcttaattatccacttagagttcggaagatcttaaggtgaaaataatctctacttggtttcacaataaacctcgctgggctatggaatcagaacactgactagcataaacaaatggaaacaagtaaatcaacaaaaaatctctccacttcttggactaaagttactaaatactcctcaattagagttagttactcagtccggtctgattctttgcaaccccatggatggtagctcatcaggctcctctgtccatggaattctccaggcaagaatactggagtggctagccattcccctctccaaggcatcatcccctgcgatctaactatgtaatgagagagataaatgatgaagattacaaacatatgaatataaagtttagatgctatataaaaacgtgtaaaaattaatgtgactcataggctaagatgaatctttaaatgataaatcatgctcattagagcttttaaaccagagagtttataacatgcattaattattgcacttatccattgtacttggacatacattttaagcagtttgagtaagtgcttatagtcagtatttattagaatcaaaataaattttgatttttcttttttcactttatttcctcaataatggtcaactatgatagttaagagtttttcctagaaacaagcttatttataaaccaccatacggttgcaaagagttggacataactgaagcaacttagcatgcatgtacacatgtaccaataaatcacactctcaatttcattcatcaatgttgatggttctgcaaacacctatcactcccacccaaggtgctcactgctaaagagtctcaggtactagaaactctgagccaaaggttaggaactgcctagtagtggcaggtgggaattacgtgaggtggagtggcagaagagcccctatattttttctttttggctgcatgtgggatcttagttcctggaccatgaatcaaatcctagacccttgcattggaggcatggagtcttaatcactggaccaccagagaagttccaaaggggactcccacattaaaggtaggaatccctagaccctggtaagagaagatggcacagaaggaagagaaaatagaatggctgtccatcttcaacatctggatgtctgcaggggacacaaactgtgagaaaaaggggtttaataaagacgagaaagatagaaagagatagaaaggagagccatgagataccctctggtctaacaccccttaagcagaaaagtttcaaggatagatcttgtgtaatattatttccagggaaagaataatatcccttcaaggtgtttgggattaacatatacacactagtatatacaaaataaataaccaacaaggacctactgtataggtagggaactatataggtaggtagggtccagggaactatctcaatgttccataataactataaggaaaaagaataggaaaaagaattttatatatatatatatatgaatcactctgctgtatacctgaaactaacacaacattgtaaaccagctataattaaataatacattttaaaaaatgaagaatatccctttgcctttcaaacatctctgtcctcaagttcattactacacagatcttatttggaagtggtaattgctttaattctgttggagaagtagaaggcttaaacttggatttatttgagagaatcaataaacatatgaaaatgtgtttttagacacagtataaaagatgactacaaactggcatcatcttggaggaagattctagactttcttggaagataacaaaaagatgagaccagggatggtaaatgtaaattgactctatatttatcagctgctactgctaagtcgcttcagtcgtgtccgactctgtgcgaccccatagatggcagcccatcaggctccacagtccctgggattctccaggcaagaacactggagtgggttgccatttccttctccagtgcatgaacgtgaaagtgaaaatgaagttgctcagtcgtgtccaactcttagcgaccccatggactgcagcctaccaggctcctccgcccatggggttttccaggcaagaggactggagtggggtgccattgccttatttatctgagcctctacaaataaacagtataggaattgatgattcaaaatttgttactatagcatccttgagaaaaaccaatatgtctagttttatcacaggtttcaaacttgctggcttgcacctgattaattcctgttcacacattctagtatggtgtatatttggaagattgtgagcaaatcttatgtacaagttccttgcttagaacctgcaaaatattgttcacatattatctcatttgatgttcacaaaaagtcaataagaaagttaaggaagacattaatttcttctaataaatctgattctctggacttttacatgtcttcctaatactcctagtatcctcagcggtattctgtagtatttgttttgtcaactagacattcctatatctaatgcagccttaattactgtcctctaggtaaagctgcttcctttcttctgacttcatacttcctataatctccaggaggctatccctataaatactaagaatgtaattgggtgttctggaccagaaactagtcatactttctttgtagcactagtgggatggtgtcttactcattcatgatggtatctattaaaacaaaatactcttgtaaagcatctcaatgtgttttcattgaactactggctgtcttccagagtagacccactccaagaaagcattctaaaaatcttgattttatttgtaagtaagttttctctaaatgacctttcaattttagagtattctatccagtgatattagtactaaacagcccaaacaagacaactcagtacaaatattcccaaatggtctattgtagcatatttccctccatatctttttgagtacagagtcaaagcggtgactttcaaaatcaggctagaaagcagtcaaaaaggagatatttgctgctaagtctcatttaaaagtcaagggtttttatctgtgaagcactctaaaattaatttcaaatgatttttcagcctggatattaaagcacttttgcttctattttaaacacacgtattgttgaaaatagtcaatttcatctcttcagatccaagattttctttttataatgtcccctttgaaaagtgaaagtgttagttgctcagtcattttcgattctttgccacccatggagtgtagcctttctcaatttggaaccagtcagatgctccatgtctgattctaactattgcttcttgacctgcacacagatttctcagaaggcaggtaaggtggtctggtattcccatctcttccagaattttccagtttgttgtgatccacacagtcaaaggctttggagtagtcaataaagcaaaagtagatattcttctggaattctcttgctctttctatgatccaacagatgttggcaatttaatatctggttcccctgatttcctaaatccagcttgaacatctggaaattcttggctcacgtactcttgaagcctagcttggagaactttgagcactactttgctagcataggagatgagtgcaactgcgtggtagtttgaatagtctttggccttgcattctttgggattggaatgaaaactgaccttttccaatcctgtggctactgctgagttctccaaatttgctggcatattgagtgcagcactttcacagcatcatttttgggacttgaaatagctcagctggaattccatcactgccactagctttgtttagtgatgcttcctaaggcccacttgactttggactccaggatatctgtctctaggtgagtgatcacatcaacatggttatctaggtcattaagatcttttttgtatagttgtgtgtattcttgccacctcttcttaatatcttttgcttctgttaggtccataccatttctgtcctttattgtgatcatctttgcatgagatgctcccttggtatctctaattttctcaaagagatctctagtctttcctatgttattgttttcctctatttctttccattgatcattgaggaaggctttcttatctctccttgctattctttggaactctgcattcaaatgggtaaatatttccttttctcttttgccttgcacgtctcttcttttctcagatttctgagaaatctgtatgcaggtcaagaagcaacagttagaactgggcatggaacaacagactggttccaaataggaaaaggagtatgtcaaggctgtatattgtcaccctgcttatttaacttatatttagagtatatcatgtgaaatgctgggctgaatgaagcacaagctggaatcaagattgttgggagaaatatcaataacctcaggtatgcagatgacaccaccgttatggcagaaagcgaagaggaactgaacagcctcttgatgaaagtgaaagaagagagtgaaaaggctaaattaaaagtcaacattcaaaaaactaagattgtggcatccagtcccaacacttcatggcaaatacatgcaacatcaatggaaacagagacagactttattttctcgggctccaaaatcactgcagatggtgactgcagccatgaaattaaaagatgcttgctccttggaagaaaagctataaccaacctggacagcatattaaaaagcagagacattactttgccaacaaaagtccgtcttgtcaaagctatggtttttccagtagtcatgtatggatgtgagagctggactattaagaaagctgagcacagaggaatcgatacttttgaactgtggtgttggagaagactcttgagtcccttggactgcaaggagatccaacctgtcaatcctaaaggaaatcagtcctgaatattccttggaaggactgatgctgaagctaaagctccaatactttgaccacctgatatgaagaactgacttacttgaaaagaccctgatgctgggaaggattgaaggcaggaggaggaggggacaacagaggatgagatggttggatggcatgtccactgactcgatggacatgagtttgaggaagctcttggaggtggtgatgaacatggaagcctggcatgctacagtccatggggttgcaaagagttggacacaactgagctactgaactgaactgaactggactatagccctccaggctattctgtccatggaattctccaggcaaaaacactggattgggtagacaatcccttctccaggggaatcttcccaactcaaggattgaacccaggtctcccacactgcaggcagattctttgacatttgagccatcagggaagcctgtcccctttataatacagaaataaaatcacatataacattatctatctacacacaggaattaaacaaataaatataatggcttaaacatacaaggaaagagaaaacaaaaggaatgtaaaataaaataatacatatttcattttggagaatctgaggcatggccacatgtgtaatgaaggaggcatgtgcttgcagccatatgtagcatcattgtggactgacaagcacaaaggcaccctcttataagtgctttgcatggccagcaatatttcatgaggaggcttattagtgacatagtttttcaaaatggtaaaatgtacagtggcaacaccagttataatagacaagctttgaaaagctgactttcagctctcagatatgcagcagaatctttcccatattgcagtgatccagtggacctaactcacacatgtgaaatgtcttcagaaatctatcaccatgatcatcaccatcttcacaaattttcaaaacacccctgggataatactgttgttgtgctgcttagtcactaagtttttagtcgcaaagactcaaagacgcatgtccaactctttgtgactccatctactgtagcctcctggctcctctgtccatagaattctccaggcaataatagtggagtgggtagccatccccttctctgtggtatcttaccgacccagggaacaaacctgtgtcttctgtttggcaggtattctttgcctggagccacttgggaagcctgaacccttgcttaaccctcggaactcaacccaggcttcctactgaaagccaggcttactttgaactgcccatgatcctttctgagtcagaaaagcctcccctagctcccaggactcaggggattaaagtcctctctttatacacctctttcacagcagacttccctggtggctcagatggtaaagcgtctgcctgcaatatgggagacccaggtttgatccctgggttgggaagatctcctggagaaggaaatggcaacccactccagtattcttgcctgaagaatcccagggatggaggagcctggtaggctacattccatggggttgcaaagagtcagacatgactgagtgacttcacttcactttacttcatagcacaggcctcagtttattagatatgtgatttgaaagtgctgatctctactttcaagctgtaagctccatgaaggcaagtcagaatctgtctgtttgactctgtatctattgtgccaaaactgtcgtcagcacatggcaggtgttcaatgataaaggaatgttaaagaaatggataaatgaatttgcaaccactcaaaagtttgaagtcctgacatattgattcactgggtaatgtgttaagatactgatctctgaatatgtttatttatatattggctgaactttaggtgcatctttagaaataataaaaataagaaagagctcttaggagaaactataaaaaccagtcaaaataaagcagttgttccttatgtaatgaactcaatatgtattgtagaatacagcctaaaaacatacgatttttagattcttattagtgaactgggtgattgtttgaattaccaaagaattgccgaaagaatattttcaaggtacttaatgaatatttatggtttctgtaactaaaaatatcttaacaacataacttttaacatatcttaaaaataaagatcactttgtcacattcccacattaatacaatagtttcaaactatctttcatggagaatatttctttattcaaatcctatttcatttctgaagaggtttgaggtctatattgtaagtgactcattcctatccttggtaaacactgaataagttcttttcatttttatctaggaattgaataaaattaacaaaatgagagccccaaatggaggctgaaatatctaaacattataatgatgactttaactctccaaacgtctttccaaaccaaaatttagccaaatgtacaatcatcatttcagtttttccaaatggctgcagttccctctcttagaatgagtgagtgagtgagtgaagtcgctctgtgaccccatggactgtagcccactaggctcctccatccatggaattttctaggcaagaatactggagtggtttgccatttccttctccaggggatcttcccgaccaggggttcgaaccagggtctcccacattgcaggcagatgctttactgtctgagccaccaaggaatcccttagaataatggagtgctcaaatctttgatagttaattgtacaggattactgtctggcaatcgaccaactccctggcgtgggggcacatcattttatttaatggttcatcaccaagaccttactagcacaaaggacaacacagatcactgcagaatcatgacaagaaagtcacagactgagtcagcccatcccacctcagagaaagaggtttcacttaataaactacccaggtaaatggtaaccaacatgagtagctattaactccaagagctgattaagtaaaagaccaaatgggcaaatattttttttttaccttcactaataaacttaatatattacctagttcaacatttctctaaaatacagtaatacagaaataacatctacagtggggcaaaacacaatatcagataaaaaggataatgacatttaaggtctgagagcttcacattttccatcaaaattgaactttaaaattttccctaagtcaaaaacagtcatttttgaaaaatgttttgttttgtggaaaatatttaactcacaaatcagcactgtacaactgaaaattttattttttaaagttatcttcaaaatatatgcccagtgtatttcacatggaagcctggatggctcatgtttaggagaagcagttgtttaaagaaaaggtaccacaggcctcatatcaaactctgttgagctcaaaagttataaaaattattaaaatagcatttacctaaaaaccaacatggatgacagggacatacttgtccttatgcttgatatcaagacagtaaaaatatcatttgtctcttttaaatttacaaatcatttaaacattttgtaccatgttttcatagtgcgggcggctgcgactggcacacatagggcggccaagaggagctaccacacgtctgaggtcagggacagaagccaggaggacccaagtccaggggcagcagccaagaggagttaccccacatccgaggtcaggggcagcagctgagagtgccaggctgcgacgacacaggaacggccaagaggagctaccccgcatctgaggtcggggcagtggccgggtggagctaccctgtgtccgagatcaggggtggcggccgggaggaggtaccccatgtccaaggagcagtggctgcgcacgggcccaggagggcctagaggagctattccacattcaaggtcaggaggcgggtggtgaggagatacccctcgtccaaggtaaggagcagtggctgtgctttcctggagcagccgtgaagagataccccacatccaaggtaagagaaacccaagtaagatggtaggtcttccaagagggcatcagagggcagacacactgaaaccatactcacggaaaactagtcaatctaatcacactaggaccacagccttgtctaactcaatgaaacaaagccatgcacgtggggccacccaagatgggcgggtcatgggggagaggtctgacagaatgtggtccactggagaagggaatggcaaaccactttagtattcttgccttgagaaccccatgaacagcatgaaaaggcaaaatgataggatactgaaagaggaactccccaggtcagtaggtgcccaatatgctactagagatcagtggagaaataactccagaaagaatgaagggatggaaccaaagcaaaaacaatacccagttgtggatgtgactggtgataaaagcaaggtccgatgctgtaaagagcagtattgcataggaacctggaatgtcaggtccatgaatcaaggcaaactggaagtggtcaaataggagatggcaagggtgaacattgacattctaggaatcagggaactaaaatggactggaatgggtgaatttaactcagatgaccattatatctactactgtggacaggaatccctcagaagaaatggagtagccatcatggtcaacaaaagagtccaaaatgcagtacttagatgcaatctcaaaaacaacaggatgatctctgttcatttccaagacaaaccattcaatatcatgataatccaagtctatgccccaaccagtaatgctgaagaagctgaggttgaacggttctatgaaggcctacaagaccttttagaactaacaccccaaaaagatgtctttttcattatagggtgaagtgaagcgaagtcgctcagtcgtgtctgactctttgcgacccgtgaactgtagcccaccaagctcctctgtccatgggattctccaggcaagaatactggagtgggttgccatattatagggtactggaatgcaaaagtaggtagtcaagaaacacctggaataacaggcaaatttgaccttggaatacggagtgaagcagggcaaagactaatagagttttaccaagaaaatgcactggtcatagcaaacaccctcttccaacaacacaagagaagactctacacatggacatcgccagatggtcaacactgaaatcagactgattatattctttgcacccaaagatggagaagctctatatggtcagcaaaaacaagcccaggagctgacagtggctcagatcatgaactccttattaccaaattcagacttaaattgaagaaagtagggaaaacctctagaccattcaggtatgacctaaatcaaatcccttatcattatacagtggaagtgagaaatagatttaagggactagatctgatatatggagtacctgatgaactatggactgaggttcgtgacattgtacaggagacagggatcaacactatcctcatggaaaagaaatgcaaaaaagcaaaatggcagtctggggaggccttacaaatagctgtgaaaagaaaagaagcgaaaagcaaaggagaaaaggaaagatataagcatctgaatgcagagttccaaagaatagcaagaagagataagaaagccttcctcagcaatcagtgcaaagaaatagaggaaaacaacagaatgggaaagactaaagatctcttcaaaaaaattagacataccaagggaacatttcatgcaaagatgggctcgataaaggacagaaacggtatggacctaacagaagcagaagatattaagaagaggtgtcaagaatacacagaagaattatacaaaaaagatcttcacgaccaagataatcacaatggtgtgatcactcacctagagccagacatcctggaatgtgaagtcaagtgggccttagaaagcatcattacgaacaacgctagtggaggtgatggaattccagtggagctgtttcaaaccctgaatgatgatgctgtgaaagtgctgcactcaatatgccaacaaatttggaaaactcagcagtggccacaggattggaaaaagtcagtcttcatcctgatcccaaagaaaggcaaagccaaagaatgctcaaactaccacacaattgcactcctctcacatgctagtaaagtaatgctcaaaattctccaagccaggcttcagcaatacgtgaaccgtgaacttcctgatgatcaagctggttttagaaaaggcagaggaaccagagatcaaattgccaacatccgctggatcatggaaaaagcaagagagttccagaaaaacatctatttctgctttattgactatgccaaagcctttgactgtgtggaacacaataaactgtggaaaattctgagagagatgggaataccagaccatctgatctgcctcttgagaaatctgtatgcaggtcaggaagcaacagttagaactggacatggacaaacacactggttccatatagcaaaaggagtacatcaaggctgtatattgtcaccctgcttatttaacttatatgcagagtacatcatgagaaacgctgggctggaagaagcacaagctggaatcaagattgccgggagaaatctcaataacctcagatatgcagatgacactatccttgtggcagaaagtgaagaggaactaaaagcctcttgagaaagtgaaagaggagagtgaaaaaactggcttaaagctcaacattcagaaaacgaagatcatgcatccggtcccatcactccatgggaaatagatggggaaacagtagaaacagtgtcagactttaattttttgggctccaaaatcactacagatggtgactgcagccatgaaattaaaagacgcttactccttggaaggaaagttatgaccaacctagatagtatattcaaaagcagagacattactttgcagactaaggtccgtctagtcaaggctatgatttttccagtagtcatgtatggatgtgagagttggactgtgaagaaggctgagcgctgaagaattgatgcttttgaactgtggagttggagaagactcttgagagtcccttggactgcaaggagatctaactagtccattctgaaggagatcagccctgggatttctttggaaggaatgatgctaaagctgaaactccagtactttggccactttatgcgaagagttgactcattggaaaagggattaggggcaggaggagaaggggacgacagaggatgagatggctggatggcatcactgacgcgatggatgtgagtctgagtgaactccaggagttggtgatggacagggaggcctggcgtgctgcaattcatggggttgcaaagagtcggacatgactgagtgactgaactgaactgaactgaaccatgtcttcctagcttccctggtggctcagagggtaaagtgtctgcctacaatgcctgagacccaggttcgatccctgggtggggaagatcccctgaagaaggagatggcaacccactccagtactcttgcctggaaaaccccaaggactgagaagcctggtaggctacagtctatggagtcccaaagagtcggacacgactgagcaactacacttcccttttctacttggtaatttctcaatcaccttttaagactaagacccaaatgtgtcatccctcgagttcctctgaaggctctgcgaccatctctgtactcagtgctcctagaaagcacttttcttacccattatctccactccaatcatcgtttccaaacagctgcagttcccgtgttgtgctgtcatttacttgtttaaatgcgtgtttcttcatcagaactccacgaatgaagggactacattccctcctttgcatcttcagcattcgagatagtttctggcacataacaagggctgaatgtatttgttttaaatgagtgatgttttacaggcaaactatgtcccttgactatgatagtaaacttcatgaatgaaaataccggggtcagcatctaaaatgaactgatgtctctgatgccagtcagaagtccctggtccttcgtcacctgcccactcagggtggtccctctagtgaaccctctggctacacagactccctttgccacgcacctcaatgttccacccctggcgtctcgtctttaatctcacctgtctctggggcttctcacatcctgtctgctccaattagaagacacaggcatcgtgcctctcctgtgaatcagatctgtattctaagccaagctctgctcagttatctgtatgtgctttagctaaaatgtccctctctgaaccaacagacaaggaggagaggttagggcgggggaggtcatgagtgtagagtcagacagacatgggcgcaagcctttcatgcctttaaacatatcaaagagcccttaagttcatgtccaatttgtaaaatcaccataacgatctattaatagtttcatcaggttgtggtgaagagcaaacaaaaccatcacagatttagaaacttggaagtgcttaaagacctctgatcttctgtagagagtccatacattaatgtagtgaccactgtcccatagcgatattcctctgtattcttccggaatgcaaatctgactctaccagccccctccaacacacacttcctcttaaaagcctccaatggttgcccatcatgctcagaataaagccttccattaaactcctggtgaatacatctccagagatttgccttctcaaatgatgtctgaccagcctcaaggaactaattccaagtccccaattaccccccttctctcatggctgcacatatactaactcttttccctgacactcactccccaaccccagtacgtctgcatacctctttcatagctcttgccacgctgtactgcaatttttttttgaggggaggctctggcttccacttcagactgtgagaacagaggtggttgtgtatgctgttgtatcgttggtgcccagactgttgcctcttgtgtgtaatgtcattgaataaggtttgcaggagggataaattactgcctggaaacccctgcttgacagctcttcgtgttcctgagttaagagttggccataatgtgtattgattaagtatggttatctcatggtaaattccttcatcattattgaaaaaataagccaagctgtggtcaattaagtaaatgcagaggaaaatatgatattaatttggggatatataatagacataataaccattttttttttaaatttggcaatttataccctgcctcttttcataaaggatacaagaaagcatatttgttgagtgaaaaaaagaaaaggagatcagaaataagcatgcggtgaggacctatacagttgctatagctgaacagtaaatctgaatctgggcttcctggaagcaaaacaacattcatagtaatacatactccagttttgatgtggcaagtaagagggtggagatagcatagaggaatggtttgaaatgcaagcaatttgaccgtttaaaaaaatgttaatagatgttatagtgatatgcatgcatggaattaaaatgaacacaaattaagaataaatattttgtaaggcacttatttttagaaattttattaataatcaacaagagctacattgttgcatctgccatgtaggagcctctctctacccacccacccattccaactccaatcctggccctttctggtttttgctcctgaaatcagataaataacctagtaatgaaaatgcgggttgagcagaggtggaactatgtgatgctttacattttgagaagtgaaatcattcaagagtcaggtggtggagatactatacaaattactctataatataaaataataatttatgatttaaatgaagaacattaaattctcatggatctcaggctgttcattaagacaaataaaataagtaaaagaagaaaatgacatgacatccttccacattggccttcaaagaaacaatgccacaactgcacattaagacaatcacacctaaatgaacatacaccaagaaagtaaaattcttctttgaaatgatttgacattgatacaccttctagcagactaacttaatcctgataatgacaccgaactcataagaagtaaactgatggaaataacattagggtgtggcctctgaaggctggaacagttctgtgaggtcaagtgacagagagaagagaatgagctgtgtcccacctgttgttgttcagtgactaagtcatgtccaactctttgcaaccccatggactgcaacatgccaggcttccctgtccttcaccatctcccggagcttgctcagatttatgtctattgagttggtgatgctatctaaccatctcatcctctgccatccccttcttcttttgacttcagtctttcccagcatcagggtcttttccactactagcccacaaaagtgaggttattaataatgctaagcttaacctcagactctctagggtccagtttatctatgcaataaatgacacttgctcaaagacagactaaaggtgcaacggctctttactgatgattaaaagcaaacttaactaataacaagtaacaacagactatttctacatactttccttcaaacaatttgtataatgctttgtgttacttaatagaatgctaaacaaatgcacaaatactaggtttaactttcaataaataagtttgcatgtaatccattttgtaacgtattgagtataatgtttaaccaagattttatattctctatggcagtctgctcttctttataacccatgttaatgaagacttgactgaaaggcaaaagggggaaagcaatatgagtttctcaggaaaaggaaaatatgtcctaatacttagatctaaaaaggtagaaatgactaaagactaatgattcatataggtaacaactaaaacacccctgcataaaaataccccataattaaattacaagcaagcaaaaaaaaaaaaaaaaaacctgggaaaatatttacaacatatactataaagggctagtattcttaatatacaaagagctctaaaacatcaataaggaaaaaaaaaaaacctgaacacctaaatgaaaaagtgtgcaaagtatatcagcatacaattaactaaagaatataaagaaaatctgacctcactattattaaaagtaaaatagcaataatatcttcatttattattaggaaatttttaaaagaataataacccacaactgttggttagggtatgaacattctccaaaattgcttgtgcaatattaatagacccaacctacctggagggcaatttggaaatatgtgtttaaaaatgcatgccatataatgaagcaattctcatcccagaagtttatcataaaacaatcaggaaagtatgtaaagaaatataaacaagtatgtccctaagactaactgttcacatttcctaaatgccttaatcctaatggcattttactgatgcaaaaataagtgacttatgtaggtgaaataatttttcaaagatacaatgagcacagccaaaaatcaataacaatatatcaaaaattcaaagccttaaccaccatcttatagaatgatgttttttattttatttttttttactaaaaaatatgctagatagaaacagaaactaggagtgacgagggcaaagaattgaagatccagagacataaagaggaacaggaaacaagacagacagaaacgaagaaagagaactggaaaagcaaaaaacataggtagaaagagacatgactgagagaagcagcacattttgagattattaatagtgtatcttatttttcttttggctatctctttcttattagtttttgaaacaagtattactaatgtaatacaaatatttttaagaataactgaactgctaatggaggcaggaacacagagttatctaattgggtatatgcctggtagcactactaaagcaaataggttaggaggtttcataaggttgagtcttacaccaaaggcagagggtaacattccaaactgtaaaccaggtaagggagaacaagataaaagataaaagaaaatgttagtctacttaattccaaagaaggccccaagtgtggttattctacgttgttaatctggggacacacacatagtttatgtcaataaagaaaaagaccaatatcattcctaatggaatctatagcccgtgtttgcaaccctaaagaatgtacatgtgggcatgtaatcactcacatgcacatgtgtgcatgcacacacataccacacgaaaatgaaaataaacccagaaaccttttcaagtggctaggacaatgctaaatggagaagcactaccagtagcagatcaactatgttaattaaggatgcaaagaattatatatgttgctgtagaggcttcactttcttagattacactgcctaaggtttgcagctaaagtaaggtaaaaaactgtttctgccaaaattgtctgaaaccacatatttttaaacagcaaaagatgaaaaatatatgtattcctacacagtgtttttcattcttttaagtcattgccaaattttgtttaaaaccataatctagagccatactaaatatgactaaatatttatgaatgaaccaacatctttctttcacttgtcttcatgaaggtagttgaaaattctgaataacactgtcaaaactctaagcttcacagaaatttccccaaattgattctgaatgtccagaaaggattgcaggggaggctggaatcagtttgagtatccttttcttaagaattagtttctctctagggacttccctagtggtccagtggttaagacttgaccttccaatacaggggaagtgggttcaaaccctgattgagagctaagaccccacatgcctcaccgccaaaaagtcaaaacataaatcagaagcaataatgtaacaaattcagtgaaggtactttagaaatggtccacattaaaaaaaaaaaatcttaaaaaaaggaattaatttgtttctagtaataataatctgtttttataccagggtgatgcatatgcataatatccatactgttaacaaccaccttaggttacccatcacttgtaatgaccactcctgatgaactcagttctctaaatgctcatcatcagagatagagcagtatgttagaaatgcaaaagatagttaagactttatttcctaagtcaatattctgacctgcatgaagcataaagagaataatattatacataaacacacaaaaacaccaaagacaccaaagacacaaatttatggccaaagtgttcacctagcagcaggtggcaaattacagttttatcttgccttctttgccacctactccccctaaaattagttccaaaggttctgctaaaagccaagtaagaaagcaaatagttttcgtatggtttaactgaacctataccagagacaaaaataaagatggcaaataggtttcaatctacctgccccttctaatcaactggtaagcattgccaagaacactgtgtcaagaaggattctgggtggctttactaattactgatgtcttttgtataaactcaagggagatcgtggagaataccatttaattctcttcttttcttttgtgtctaatatattatacttccactgataattggacttattgtcaaacctcatcctattttcatgtaaatataaaacaactagataggtcagatttttttggcaaatattaattaacatagactttagttaggttgagatgccctctcagcaagatgtgatagatggaaagatttaacaagatagtgaacagagataagaatatacattgcaccaatgcatgtgagtcagaggaacagatctgctgtgaatcccaagggcctctaagaaacattgcaaagaggaaaccagaaattccatatttaagcttcatgtagaaaattgatgatatagagaaagagtacataggcctacaaatcaatacaaactggttaccccttcttgttaacagtttgggtcttatcagcttctgtgctattaaaaaattgtgagaaaaattattttaaaagataacaaacatttcactgtctgaaatactatgtattattttgttatttttatcatttatcttcaaaataatgttttgaaaggttcagatgagtgtttatagtaaaggactgaaaaggcaacgtttagattctgatttgaacctcagctctgccactgatttttttcattcactactttttatatttgacaaagacttgttaattactatatgtaatgggaaaacacaacaaatcaaaacagttcacagaatttgcaataggaaatagagcaggaaattaaaaagtggaaaatattacaaggatgcattttagaagcagaaagacaagagtgaacacagctagcaactgaatttcttcatatatactgtacatcctgcttctttgcatagttatttcaaggctacaagatcacatagaatttcttttactgtaaatacactaatttacttcttctcccattaaggctgaaaagaacaacagtctggcattttaagtccaggttacgtccctttggtgtcaaatttttcatttcaatcatccaacggcattgttaagcattcacaaaacaaatatgtctttacataaagtcaatatggttttagagcatccctcctagacataaatgcagaaattctccttgaactgtagacatcctcagggaaaactttctgataaccacaagcgtccaagaccctaatcttggttaatcactaacaggttagcatctctgaaaacagcacagcctaagagcagaagaatgtgtggtctggttctcatagaattttaaacctaggacaaaacatagggatttagaaggttatttttttaaaatctgaattaataacacattatcagtttggtacaaaaatatgaacagcaattatcaagcttccagatatgcaatatagctcagaaataggatgtgcttgctactgattctgtagagaaagaatatagaatttttagcacaagcaaccttttgcaatataataaacaatctaccaaatgatcttaaaacactgaaaaatcttatgctattttatttgtactgaattatcaattagctcaataaatcctattctatcctcaaagtaccaataataagatatacaacatgtattgagtaaaaatggaaaataattgtatagcataacatttatatcataatacactttatttcatttatctacattaaaagcattgtaaaaattcaaaataggcttctctctgctctcagctctaagattttgggctgaagaaatgactaacccaggaacttctaccaagttcataaagaatcatgacttttccattctcttcattatagatgaataggtagctagtcaactaacccaaaattctgggcacagaatgccacctaaagcatctcaccgagaaaaatggccctaaagtaatgaggactgagagataccattctttgaaggaaactttaagagctttggaccttggacaagtcacttggttctacacagaatggtgatactcacctagaaattgaaaagcaatcaactaggtaagatcagttacagaaaaaacaacctttcgctagacaattgagatcagaagacttcaaactagcactttatgaaatgtctacattaaattgaagaaaatcataagtaacagaaaatgtcacagcacatacagatggtcacctgtagcggattcatgtcaatgtagggcaaaaccaatacagtgttgtaaagtaaaaaaaaataaaataataataataataataaaaataaatagacatcaccagaagaaagtaaaaaaaaaaaaaaagatattttgatctcccacgttttaagaagagaaaattcaagtgttcaccttagaaagggcaaaatattatgttcaccagttaaattataaacttcatgtgagaaaaaaaaaaagtctaaactaaatagtcaagggagacaacagtccagaattgaactgagtagacatggcatcaattttaaaggaagcctgaaactcttgaatttagctgttcattccaaagtcttcctttaagtactattcattttgctaagtttttttttcacctagattataatagaagacagcaatctgtcaggtttaactcataatacagatgtgaagtattactattttattgattaataactgatcattctagtcaaaataaattaatttagctttagatttctaatcaaaaatgcttacatgaatgaagaaatagattaaaactttaaacaaggtggcaacaatcgtataaagtaggcaggagaaaaaacaaatagttaagttgagagactgacttggaggcttttagtatggtctaagtttgaggtaataagtaaattcaacaaaaaaaaagacaagacataactacttagaaaagatgctaagtacaaaattgcaaagtttggcagttggttgggtggaaacacatgacaggagtaaaaagaaaatttcagagttcagcaagaggaagaatagacattgcgctaacaaaacataagacaataggagtagttggttgaataacaaaaaaactaaagagtacgtggccatctgtaaggaaatgtaacctagaattcaaaagcgtgcttacataacagagaaggacttgtagattacaaacatcatgtgaatagataagatgataaaaagtttaaaaattacagtaagaccattgatggaattttgaaaaaaagtgatgtttgaaagtgatggaaggaattttattcattctttgtttctattactgtgttaagtatcatctaagtactgaaaacttaaaaactaagagaggcgtgatggatatttgaagaccaaaagaaccatgttttcctttgtaatacttacaagtatatattcctcctgcaaatatctcttgagaaccaactccttgaaaggaatttaccaaatgctaaaaaaattgttattcttggtttcagaagctaccgtaatatagtaatcatttttccttggaaaatacagtgaattacaaaacaaatgaaaaatctacaagtacctaattcagtgcatgtgtgaagttctgacaagactgttaaaaaataaaagtcaagggttttgttatataccatgccataattaggtgaaatcaccattgttgtgtaaacagagtccactcacagttaactgaaagtccatccatttagtgagatgacactcaagcagtgcgaaaatcagttggggtgaaatgattaaaggcaacaactgcctctctttttgacattgaattctgctggtctcctgaatggttttttagtcttcatttccctctcaaactttacattatcacattttacagtaaagatcctttcattttctagcatatgacaagaaaatgttattcctagacacgtaagaaaataattttaaaaactggtatttattttacatagtttgaacagaaaaatacagagaatgtgttattcaaaacagaatggtccagagcttactttttcttttttaagcataaagtgaatgaaacctttcatatcaaaagaatgaaattttgaaaatgataattaagggtggattctgctttcattttctgcttagaatatctatcacaaaagcagaaaaaagaggtctacttttaaaaacaatttatacatcaaataacattactttgattgtaggcaggttaaaaaattctgtgagaagtgacaccttacaaagacatgttaccagaaattgccgcctcacctaaagaaataaatgtttaacgctgaacactagcaatgctgtactttacctattgtcaaaggctcctactcactttaacgctcagatcagcccactacattaaatgaaacttccttattaaaaaaaaaattgccttatataattcaatgttctttgaatactatgttatcccaaagctgcaaaaaactattactactttaatcattaagaaaacttcctcttatctatacaccatgactttcaccaaagtcataagcttgtccgtgcatattacttaagtcttactatcaaatgctctaattaatggtctttaacactgactctgctatggactccaaaatgtaccctgaggttactaccattagggggaaaaattaagatttaaatgtatatctatctatcccttagaatattttatgtagcaaaattcagaaactgacttttcaacctttcctttattccagggctttaaaaggagaaaaaaatgaagaaagaaagaaatatagcagcctaccccacaaaatgccactattcagtatgtcagtacaaatctcccatttgtaatcaatcacccaagaaaagaaaagaaaaactatagctacacatttatgtgttgctacaatttcattttatggacatttgcatgtacatttgcaaactgtggcccgtactatgagcaaggagagaaagatctttcaactaatgttcatttttcccaatctcatcgaaagtcaagtgtttcctggatttccccgggggtctagtgtttaagaatctgccttgcaatgcaggggacacaggttccatccctggtaggtgaactaaggtcccgcatgtcctggagcaactaagccagcactgcaactacttcagcccgagagccacagtgaaagatcctgcacagcgcaacaaacatccttcgagccacaactaacacccaaggcagccaaacagataagtaatttttgtttttttttttaagtgtttccaagaaaggagagtcacagaccattccagactccaaacatgggtctgactgtggacttggtgccccagcagagctgactttacagctgagccttaaacgatgaatattatgtttcttaaggaaagatgaaagagcatttcggactgaagggacagtctgtgtaggagcaccatggctgaaagtccacatcctggtgtggagatggcccatactccagagtggagtgagcaaggattcctggactgacttggcatcagaaagagagtattttccccaaatcagatttctaggctcttatctagaaataggaactccactgtggagctttagcatctagatttttaaaaccctttagaaaagtacaggacacagagtgagtcttattcatcactggagtaagccttaggtggtatatacatcattagacatgactacacactttcagtagatgctttgccaacagcaaagaaacctacagaaagtatggcatgagttgtttttgctgtcatcaccactgtttttttaatggccaagaaaagccagaggaagggcatgggtactcacatttatactccttaaacaatgcaggagttaaaatatattcagccaccaaattttaataaaaggtctgagtcttttatcaaaccaacagtaatggggttcacttgatggactacagggctcaactgtctatctaacattccagaatgactctgatgcatcataataggcttggcctttagaagacactaaaataatgaggggcctccctggtggctcagaggaagagaatctatatgccaatgcagaaactgtgagttcaatccctgggttgggaagatcctgtggagaaggaaatgcaacccacctcagtattcttgtctggagaaccccatggacagaggatacagtctatggcattgctcttaagagtcccttggactgcaacaagatcaaaccagtcaatcccaaggaaataaaccctggatattccttagaaggactgctgctgaaggtccaatactttggctacctgatgagaagagccagctccctggaaaagaccctgatgctgggaaagagtgaaggtaaaagaaggaggaggcagcagaggatgagatggttagatggcaacaactcaatggacatgagtttgagcaaactccatgagatagaggaggacagaggagactggcatataatagtccacggcatcgcaaagagttggacatgacttagtgactaaacaacaagaaaatactgagtctctagatttaccagttccttaatacaactgatcattactgaaagcatttgcatgcagctatgttgacagtgtattaacagccaatgacatatttctaatgcctgcggagactccttcttctttaatatttcttactcagcactatttattaaaaacattctagatgaacagttaagatgaactatgacttaagttccttcatcaggtttcatctgatctgcacagattcttaccccaggacccatagttgggaattttaaagcagtttagaatttttgcatgaaactatgaattaatttggttgatcaccactgaattttatgtgttccaaaaaatatacctgacttaaaatggctttcataggtggcagtcatgttaatgcaaagtagaaacatcttagtggataccagagacagaccaggctgacagagaagtctgtctggcccaagtctaccatgcagtcttgcagcccgatgtttggacatgcagcatagatttttgtcatggtaacttatcaggtactccctctagaaattcagagaaggatagaaccccattatgggtgcaaaacaccaccccacctccaagattcaatctaaaaacctaaaatcggtgaccactagcagcaagctccatgttttattttctttcaacttcctctctgtcttctgcatctcctttttcctattttgtggcattgcacatacaagcaggaaaaacagaagatgtaaactgtttaaatgggaataaggtaaaagatcagaaaatgcaattcttacttaagtctttaaagaaatacccttctttgtaaagggtgcacatgggtatgtgcgtgttgtcagacacatggaatgggaaaaggaaatggctcgtaagatgtcaggcggtaatatgcctcaggaggtcaagctgggttgcctgacaagggccttttggtcactgccagatccgatttatcaggtcgctattgatggccacaccgaagaggcctgaaggaagtagagactattaaatcacttgtttacctcaagtgagcaccagtggtactcagtcaatgattttattgatccacaatactgttcaattaagtgtgtttattttgattctgcgattaacatgcatttgcagaaggaatactcacagtggaataaagtctaaaattatcccttctgctccctcacttcttccttgtgtcattttgagttaatggtttacacattaaatgaacagatatgatcatgtttaagggtagagttgagggcagctctcagaccttctgagatttcacttcctcagtgtagtcagtgaagagaagaacagagcaggagttagaaataaagcttaaggggtgggtgcctcccagacaacaggtaaagatctggttgcatggctgttgagaaaagagacaagattgattttgctgccaaaacatcatgattcaaatagctaaatcaacaggctaaagaaagaaaaaaatgaaagcagagtatatttagtcaaaccagggaggaaagccgtaactccaagcgtgtcgtggtgagaattggtgaggcttgttcacgtcaccaagtgaccgtaccaataacatccaaatgcttgccccttttcctaccagctcctaacacacaccatcttcattctctgcttattcctcttgtatagtctatggtaacaaatatttgggacaaatattctaggcctatttatatggaagaaactttaactgtaatgcattgtgcctgactccatcaagcatctattcccacataatacaactgaagaagataatatttctgagattctatcaataactttgatgtcattggaagaagcttggacactatgaccaaaatacaaaggctgcagttttcacaaactattctgctcttgtcttcactagaagtgaagctgagaacacggtcatttctgaaataagagaaatgaaagaaagtcttgccttctcttgtccccaaaataagtccatctgaaataactgccttttagaaagaatgatataaggaacagaaagctctagaaataaaaacttttggattattttaaagtgtctccatttctatttatactgcaaagcccttccagattgcttacattgtccagaatgctactgccagggcacctgtcattgtccttaccctcatatatgaacttactttgttttctaccaccaaggacacacatatcttctgaatcttggcccacaaaagtacagattgaataactcatttcagttgtctgtttggttcatgagattttatatttggaaatactgatggagagtgggtttgccatgtggtgcttgccataaagaacccacctgccaatgaaggagatgtaaaagacgtgagttcgatacctgtctcgggtaggtactctagggcctggcaacccactccagtattcctgcctggagaatcccatggacagtggagcctggcaggctatggtccagagtgtcacaaaaagtaggacatgactgaagcaacttagcacgtacgcatgtaacgatgcagagtaaaaaatattatagaatctggacttggcctggctcttggccactgaaatgtggtcttcacaccttttgcctgagttgatattgagaagtaggggtttcaagttaggatttctctgtttactcttatttctgccccaatggagccacagttttaaagtcggtgaatttcacagaatttaaacacatagatctcattcatggaaacacagccacctctctctggcatctcttcatggcccaatttccctagagggtgatttatattccacttctggaattccatgcacatttggttttactgcacactctcctctcttagaaatttcatccaccctcattattctacctatgaattcaacggatatgattttcaaatctacattggcaatccctgatgtctactgtattacttcttctccttgatatcctataaaaaactcaaacacaagtgtattaaaaattgtactcagcacgctttttctttcaagtaattccccctcttctattatcaacttttgacacaaacatcctctaccaccctgtttcaaaaacagcttagtcacctgagagagtcttctactttctttatgtttaccactctgctaagcagctttcaagttctgtcagttctatttaggaaaaatcctttaaacacttacttcaagattctacatttactttacttgagtaaaaagtaatgatttgccttattttcctggagtgataagggtttatgtccttgatatttgggcttcccaggtggcgctagtggtaaagaacctgcctgccaatgcaggagacataagagacccaggtttgatccctaagtcaggaagatcccctggaggaggacatggcaacccactccaatattcttgcctggagaatcccatggacagaggagcatggtgggctacagtccatggaatagcatagagtcggacacgactgaagcaacttacttagcacacacacatgtccttgatactaatatcttccccaaccaatccatcttacactgttcctttctttcctcttttctctgtgatttcgttccctctttcctttcctttcttcctttctcctttttaaaagtattatttatttattaattgtatttagctgcacttgacctgcctcttgagaaacctatacacaggtcaggaagcaacagttagaactggacatggaacaacagtctggatccaaataggaaaaggagtacatcaaggctgtatattgtcaccctgcttatttaacttctatgcagagtatatcatgagaaacactgggctggaagaagcacaagctggaatcaagattgctgggagaaatatcaataacctcagatatgcagatgacactacccttatggcagaaagtgaagaggaacgaaaaagcctcttgatgaaagtgaaagtggagagtgaaaaagttggcttaaagctcaacatttagaaaacgaagatcatggcatctggtcccatcactttatggcaaatagatggggaaacagtggaaacagtgtcagactttattttggggggctccaaaatcactgtagatggtgattgcagccatgaaattaaaagacacttactccttggaaggaaagttatgaccaacctagatagcatattcaaaagcagagacattactttgcagactaaggtccgtctagtcaaggctatggtttttccagtagtcatgtatggatgtgagagttggactgtgaagaaggctgagcgctgaagaattgatgcttttgaactgtggtgttggagaagactcttgagagtctcttggactgcaaggagatccaaccagtccatcctaaaggagatcagtcctgggtgttcattggaaggactgatgctgaagctgaaactccaatactttggtcacctcatgagaagagttgactcattggaaaagactctgatgctgggagggattagggccaagaggagaaggggacgacagaggatgagatggctggatggcatcactgactcgatggacatgagcttgtgtgaactctgggagttagtgatggacaggggaggcctggcgtgctgtgattcatgggttcataaggagtcggacagggctgagtgaactgaactgagctgcgctgggtcttcgttgggcttcccaggtggctcagtggtaaagaatcgaccggccaatgcaggagatgtgagttcaatccctgggtcaggaagatcccctagagtaggaaatgacaacccattccagtattcttgcctggaaaattctgtaagcagaggagcctggcaagctaaagtccacggggtcacaaaagaatcagacatgacttagcgagtaaacaacaagggtggtaatgctgaggcacacaagatctttagttgtggcacatgggatctagctccctgagcagagatcgaatccaggctccctgcatcaggagcaaggagttagcccttggaccaccagaaaagtctgtttctctctccttttttacctacttcctttttagtttctctaacattaatatgcatgttcaatgtgccagacataggaatacaatgccaaataaaacaaacaggatcctttgcctcagaggcctactagacaaagctctcttactcacataatcaccttccagataactttctcctatccaaaactaagagaaatctccccaacaaattctgagaaaaggtctaactacttacctcaaattcagcaattcacttccaataccattacatttcaaaattaatcgaatcttaactaattcttgagatttaactatttcattgttgcaatacaagtagttttagattgaaccttataaatccattttgtttcaaaagagaagggaaagaaaataacatttaataattttagaacctgaattttttctcaaatagaggtcagaagctataaatataagagatactaaattcatatcacttatgaaagatactaaactcaaaatattaacttttaaattttattgtttttctcctaagcatttcatttaaccatgattggcaagaatgtctataagaaaatgaaattactcttgttctggtagctagcattcctcttcctggttacctccatcttggcctgtgtcaatcctacaaatcttctagggttcagttcaaaaatcatttccataatgcctttccagataacttgagtagaaagaattctctgttctctagcttgccccactaaatttccccatttcagttatgttattattgtatttttttttaaatcacagacttttaggcacacttaagaatggatacattcagtgggtacatggaaagaaattttgttttttgacttctaggtaatattccaaagtaaccatgaggctgttatattataatctcctacaagaaatgttatcacagtttatagttcttttcttggtattcccaaggtgcaagatgaatagaaagagacaaaaatcaatgctgaaggataatagtttctaaatttttgaaatttaagatgtacctaaggggatttccctggtggtctagtggtaaagaatctgccttgcaatgtagaggatgtggattcgacccttggtccaagaactaaaatcccacatgccagggagcaaataagcctgtgtgccatagctactgagcctatgccacacaactagagagaccaagtgccacaaggaaagattccacatgacacacggaagatcccacgtgtcacaattaccacccgatgcagcaaaatcaataaattaaaaaaaaaaagatggacctgaaaaaaagaggtataatcaaatctaacaggacagatcctattgcctatgacagagtgacaaggtcttgagagcctatactttagtctccgctgatctaaagattcagactgaggacgaccttcctaaatcatgatctctgtatgaactgccttacgtggttctataagaatttggttataagagaaataaatcttgttctgctgatccccttggatttttatttaagaaatatggataaactgtgactattagcaattaagtcaatcagtggcttttgtttaatgactacatttggaaagcatatttctgaacttataaagatccttgagatggcccctgcaacttcatcccacttagacaatccaaacttgctaaatgaccagaaaacattcagaatttcacccattccctgtcctgtgtctaaaagcaagtgaatgcacgtcacgtagggcttccccaatggctcagtggtcacgaatctgcctgcagtgtaggagactcaggttcgatccctgggtcaggaagatctctggaaaaggaaatggctacccaccccagtattcttgcctgggaaatcccatggacagaggtgtctagcagaccgtagtccatgcggtccaaaagagttggacatgacttagcaactaagctacaacaacataggttacttagctgatctggttagatcagcataactatggtgagagccatcagtagacacatccgtaaacccccagatcctggaaggcaaacagggaccaggggcaaggctgcctggatgtcctaaaacaatgcctcccaggaggtggtttttctttacctatccacaagaaaaaccaaacttctgacaaatgtgacacaaaaataatcttaagtgccatttttgcaaaatgttcctttcatttgcaatttgtaattaatttgtaatactgtaatactgtaacattatctttatatgtgaccaaattgctaaattttaaaaatatacaatatttcatctcttcatctaagaagccatgctagattgtcctctttcagaagcatctctgtcctgatttttaagtggaaatctgtaaatttttatctgatgcaacttcatgtgtaaaaatatagagttaatttcatagagcatggaaaaaatcaaattttaaaaaaacaatgccacttgcaattggctaacactgacgataacaagttacagtgggttctagcaaattcatggtggttctaagagctttttagaaatagcctgtgctcaacacaattacaattagcctgtttcaatataatagcataataggtaaattcatgaaaataactactattttttagcattcactatgttccaggcactaggcaaagcagataacattcattattgtatttaatcctcacaaagccttacactataggtactatgagaatcctacattataagtgaagaagctgaaggtctggaaaagttaagtaattttccccatgtcacacagcaaataagtgacacagctgagacttggatccaggattctctgactccaaatctgtaattgctatactatgtgacctaataagcaaataggcaaagtacagcaaatcttcaaaaatgcgaagtatcgtgataatattagtccatgtagtaattgtttatttggctattagtaaaattatctgttacaatgaaatgtattctggccctttttcacaatgagataacaagagtgaaaatgcacatgaatttgtaatgccttatcatttattcttatagtcagaattttttaaaaaaatatgtatgactgtcataatcaagaagagataaaactgcattaagtatctgagaaaaaataagtttacttgtattaatagtagtcagggagatgtaggtccatagacacagatttactttttgtttagtcattcagtcaggtccaactcttttgtgacccaatgggatcctcagtccatgggatttcccaggaagaacactggagtgggttgccacttccccctccaggggatcttcccaatccagagaacaaacctcatcttctgcagtggcatctggattctttaccactgagcaccagggaagcccacggatttactacttagggtgtaaaatgtgattctagatgggggtggggagaaacattgctgatgttagcttcatcagtaagtccatttttaggattcagtaaacaagtatttaaactctaagagtggttttgatcataaaagcaactgtgtatttgccggaagtcataaacttctgaggaaaaaaaagtctatgtgatatgtacgtgtttgcagtcgactgtctggtgttccacgttccttttatattgctgcatctgggggcctgagagtaggttcaggagtacacctacaattaatcaagggttttttagccttcctattttgaaaaacttggacaactcacgatctgaaattatctgcatttttggcaatacacgcagccattaatccattacaatttactctaaaatcaattgtatatggtagacattcaagttacatatccagagatctggtagacttttgtctatagactggaaactacctagatgatgaagtcactgagccaagctaagcagacggttctaactccattcttccagtaaagccagaggcatataaagagactttgtttctgtttttcacactatatttcacttttttatctgcttacctaatatagctcttatgtttatttgtctaagaaaatatggcccagatttttatatcaatttaatatttcatcctaataaatgttttatttagaagacattcctgtccatacactgaaattcaaaccacagaggaaaagtttattaagaacaaagtaaacttgatcagaaatccactaactgattttattaatagaaattcaatttactgactttttaaaaataaatgcaaaacaaaagtttatcatgtatattttttccagagctggtctttgcaacttagccatttatttaacacaagtaattccaactacacttttacatcagacacacatgccacttctcttgatagaaaagtgttgttaggttaaagtcattttttaaaaaaattatattctaagccctaaaggataaacatttatccactaagacagaaggataaagattttaatggcatcttgctttaggattcaaaataaataaggcaaagatgagtttccatcttcttaagactaaattacagagattaaaatatataaacacaaaatgaatgtgttccatttgcatattatatttcgctcttaaagttgattttgaagattaagggtcagcatttaatcctcactatcctaatccctaaaattacaaagacaggcataagtgcatgtctgctgcactaaattaccttgaaagaaagcaaattccggatgaaaagggaagcatatttatattatggtgatttaaaatctgtcgcctaaacacatcttctcccctcgatccattgacctaaattgcacactaaaagcttgtttgtctgcaaatgggcagctaacactttgagacaatccagagattcttcacttatgcagaatcatgccaacaatttttctgactacaataaacactgtcttgttcatattccgcagaaacaggaattgtgttataaaacagaagactttctttgcagtgttaaaaccatttcctggatagttaattatgaaaatttagaactctggatgcaagaagttgtgaatgcaaaactatctaccaaaaatttcattaaagtgtttttatatctatcaaaatattgctagttctattgaattttaatgcttttttcatgaagggagaaaagatgggtaattttggctcaaggtttaaaaaatactttctagagaaggatttacttcctaaatattctttataacactatctaaaatctgaaatccagtacaatgaattttcggagcaaaataaatctgatgaataaattcacctaggggttcagaaacccccacaattcttattttctttcaaaatattacattcatatcaacatggatgtgtacaacaaaaatatcataatggcaaagcaggaatagtatacatttgcaaaggatcaaattctttcctaggatatattccctagttttgtcagatatgcatttattttagaagataatttcctgaaatcacattatgtacatcagtcagattttaacactgaaatagatttagttcctctgtaaatctgctccatcattaatccagtgtcaatagagcaccatgttccttcctttaaaatgtatttcaaacaatttcacatatctctaaagaatggaatccccactgttaaaatctaggctatttctgtgcatctgtaataattggtatatattaaggaaattttcctgtaacatattatataacactgaagactaaaatgtacctctctctgtgaatatgtttaaaagactacaccggataatggtaaattagtataacactaactttactactgtgtaaacgtatattcaggaatattttcaagtgcactgaaatttttcatggagaagcctcattttatggagatgtagaagctacaatgaaaaggtccaatcatcttaaaagggagactaaactgcaaatgatacagtgatactcagcgtttcagggctaaacccctgctgttcagccacagtggttacaaaagcagactaatgaaagctgcaaaaattataattaattttcattctaaagaaatcattctgcgctaatcaactgcctatcaaacgtcattgcaaattatgctaaagaaaaaattattaggccagatttccagggtaaaattttccatatactgtatcagaataaagaatgcctgtgtgggaattacttttaatgaacaacaaattacaattactaaactaaatgaaccatctgcctttttttttgttgttgtttgttttcacggcctcactggtgcagagtgcattgtcagcttaattcccattcaaaatggcagactgcctcatcaccagggtctctcgtccataacattttaacagaaaatctgtaacagatgttttcaattttaagaagaggacaagtatgttttataaatatgttctaaacattaaaggctggcgtttataataataaggtacatgcctttttcagactggagagcttggatgactaagtactcctaaaccctaaattagcacataaagtattcatagaccaataccaataaaaacaaatcctgatgtactttattaaacatttcattcaagtaaatgtgttttgtctctatcctctaataggtgatcatttgtttccaaggagcatgcgtgaggacattcaataatgacatctattatcaaacctttactgaaaggtttaaagtggttagctggatacatcatctggcatcagcagaaaacattaaaaatggaaaaatcagtctcttattagcatgtgtctcatattagctgggcctttccctcctgaggtttagggaccatgatactgtaaaacacttggaagattgactattctcggggccatttaggaaaaagaaaatctgatctgggcatgctcttaaaaccagagcacagcatatgaatatatcttaatatagtgcaaaaggaatatttactaaaattaatgactgttttttttttctttccacttctatttaggacactgacaagtagcactgacttgaaactgcaatgaggacatgttttaaaatagttctttaacatcccttatttaccattttttttcctcctttaagtgaaagtgaatatcctaactgcctaccatcccccgacccctggactctgggcctccactgatcactttgcaggcatagcactgactgagggactgtgaggccccctggacaccagtgtgtctcagcccagacccggggaatcagctctgaggaagtcaagagagcagttttcatatattcacccagtccttcctttctctgtgatgacaaccaaaagggaaaattaaaaaaaaaaaaagactggtaaagctatgagagcttactccccacaagaaaaatgaactagatcgcttctcctggtcctaacattgcttcactttcattttaatttaaagtttggtacactgctatttttttccccttgactatccccggacatccagattcctttttgcaattaaaaaaacaaaaggcaaattgtattagattatttcatgagctagatatagagaaggatatatgattccaggcctctccacagactggatgaatctctgtctaaacactctctgctttgagtgcatatttaactatcatgcgctgctttagaaaagcggcttccatgccagggtccactcagtgtaatggtgtctgcttagaagattatttaaatctccccccacccttgttctttaggcaagaatgaagaaaatgacagctccattattagaaatgtggcctcagaaacgatccaatggagaagtctccaaagggatactgaggcaaaagcacagcttgaaaagcctttccttatttctgtagttgtgttttttgaaagcaagtcatgactgaaaaatacggtttttcatattttcctaggctttattttgcatttgatcatgaaaatatactaaggcactaccattgtgttttatttctttagttttacagtacagttatggccaacagagagaccttggctttgcaagaaatccaaaggaatgcttaattttaggtaaaaatcgtttttactcaaaatatacatgacattgataatggagcagttttgttcatttttaacaactttttgaacttataaaatattatgaatgtgaataatttatcaatcaatactcctttaacactgatacacttaaatatcccataaaacagcctgcccttctaaaaagtaaaatagttttgaaaaaaagttactttaccagaaaatgcctgtgtttatactgatgacatccagaataatactttgataaaggaattcaactcatgacaaactattcttttatgaaaaaacagcacttgagaatttattaggaaccattaccatatattttactcattaaaaatttgatcataagtgtgctacctacagttattacatgaagtaaaaactgattctcatagtccatttgaaggatgttggctaaaattagtaactcctgtgtgaccagcattcatttctttgattttcagaaatatacattgacactaactttgttatagattgagagagcattgttctactttactgatcttgaaaatatgaaacaacggactgacggactttggaaacttggaattttttcagttatatttgaagcaaaatatctgctgacatctacagatcagtgactgaatgaaagaggagttacagcagcttcagtattgattcaaactcatggattccctgggcatgtaccactgttgctgctgctaagtcacttcagttgtgtccgactctgtgcgaccccatagacagcagcccaccaggctcccccgtccctgggattctccaggcaagcaccctggagtgcgttgccatttccttctccaatgcaggaaagtaaaaagtgaaagtgaagccactcagtcttgttcgactcttagcgaccccatggattgcagcctaccaggctcctccgcccatgggattttccaggcaagagtactggagtggggtgccattgccttctccatgtaccactgttactagcacctagatcacagtctcccattactgaggtaaatatcttcactgatactcagttataacttagggaggaagcaagcacctctttcctgactcagacaatgggcttctttcccttccccctacctccagattcaaccaccacctttccaagtcccataaggctccatccaaacactacccagttagccatactctcttggactcgtaaaaagtctgaccaccttggactggcgtgctgcagtccatgtccatagcgttgcaaagagttggactcgattgagcaaactgaacaacaactttggagctgtgtccactctccaggatgtttgcacttaaatttatagagtcagagaatcttataaggggtatagaaacactcctcagtgggaaaatgcagatttttttatacatccacacctttcaaaagctcactgatggatgcccagtggtccctggacctgactgagaatgtcagcctgcagagaagctaagcggtgaagaacaatgagtaaacagcacagcctctaggcagacaagtctgggttcattctcacctcctcaccttttctgtatgaccttgggtaagaaacctgaccttgctaaatctcatcacctcatccctacagttgcaataacttcctgccccttgctgggctgtcaggaagactaaaagatacagtagatacaaaatatcccttggtacatagaatcttcactattctgtggtgacacaaaaagtaggaacttgagatagggtgtgatctagtgacagttactcagttttgtcccactctttgtgaccccatggactgtacagcccatggaattctccaggccagaatcctggagtggatagctgttctcttctccaggggatcttcccaacgcagggattgaacccaggtctcctgcattgcaagaggattatttaccaggagccacagggtgtagtagttgtttatgtgtctctccccagccccaagtcaggaaccatgtgttaactaagtctgcacaccctggggaatcctaaaaagtggctttgaaagtatactattaggcaaaactcttttgcaaaacttaagaatttttgcaacagtgtattatgtgagcaaagtttgcaggatccatgcatgtgcttcacagttttaaactcttcacttattatctctttgttcatgtggtcacaaatcattccactggcagcaactaaaccagttctttctctttaaaaataatacagatggacttccttgggagatggttttaatattgcttgtctgccagggaggagtctcctcaaggtctcctttgtcccgtcgaatctaagatgaattagtttttccagaatcttctaactcaattattccagaggtaaattatttgttattaacaaatagaaaaacaaacatcaagttctcctttgtcactttgaaatgtgttcactcccagtgacacggaaggatttccagttctttctgacacacggtacaaagatgcacatggcctagcttcacgtctctttattatttcatagactccagtaaattctgctcctattcttctccttctgagatttattaataccagcttttagtcatctgtaaacccatccatgctggctgcaagcattcttgttaccctggtctggagcttttcaatctgttatatgtcttttggggtgaaaggttcacgtctataatatttctgttttgttcatgctgatgcaatagaattttataacatacaacaaagaactggaatctcggcaacagcatatgtaaaagcatgtcaggagaaaagggcaactccaagagactgagtctaagaggccccatccttcagtcatccatcccatgggagcccttttgcaattaattggaataatatgtcacctaaattgaacaacagaaatcatcttttgctctttaagaccaggaaaattagatattttgtacaaaaagtaactaaaatggaggattgttaattaaagatttgccagaatcatttcaagtcacaactctccatttcacagcatctctttactctctaccaaacaaaaacaaaatattatcagagcagggccattgcttcggccttaatctcatccatttactcacggatttattttgaagttcttacaaaaagctaagcttcaaggcacaaggtacacaccatatttctcctcttgtaatcttgacattggctgtcattaccattgcagtaaatccgtagggtggggaatgtggtaaagaacagaaagtgcttccaaaaattcttcatagttgtcctttattgtgattgtatttgttctactaaaatgttttaataaaaacaaatgtttgctctcatcagaccctttaagaaccactagcaaaagatatctcaggaaaggaggggtacggaccaaagctttagcatgaaattatctctgaccttgaaatatgaccataggtgattgaagtcatagtcatcatcacaacatttttgaggtctcaaataaaacttaacatttttcttagacctgtgaacatggtggggaatgttctaatcatctacaccagaatcacttatttcaataattaatagaactagttgtgaatatgaatttttaaagcatccacacagaaagacatagatgattcagggtaattactttcataacaattggtaagggggcgggggggggtctcctggactgtgtcccttgtcactaatcactcatttcaaacttgtgactgtttgagggcctcattttgatggcctaatactatcaggagcaaatttcaacataaattatttaaaaaccatgataaaggccagcctagccacctgcgctggaagagtatgtgtccttcctttcatctcttgattaccacggggctgactttccaatttatggattataactataccttttactagttcttttcaaccactggtttcctgcctcttggccatttcttagctcattttcatatcacccagaggagaaggagagaaaattaaacgccaacctatagaatttgttctaatgaaaggaaaaggcagagattggaagccactggctaaaatgaggtttggggattttcatacttgctgtggttccagttaacctagagtaccaagggcccactttctatgaagttatttacccttcactttcaaagatgattttaccatgaccatggtgagaaagctattccacaaacccagaactttccataaagtttctgaaacaaaattatatgcaaaaagataaagtaaaataaaactcgaaatatatatttaagatgcaaaattttggaaaaatcagtgtagaacacattggtcctcacttacaaattattactatgctttgctcaagaagtaagctgtaatggcttcaaatgtattaataggtttctgcttattgactgcttttactgatagagcattccagccccagtccccaaaagggttaatgctactgggtgagcagaattcatgaccataatcctaaacaagtgaggtgaagttctatcaggtctatttcagcgtatcagggattaccgctagctgtctaatcctgctgagcctcagggaggaacgttctattgtatttgaaatcctggccaggaaagaacagaaggttaaatgggtgccttgctctgtaatcaaatatcacaggcactacttatctattcagtgaacaactgacgtagaaaatcaattaggaaccaaatggcttcttaggaatttttacccagaaacaagcaagactttttttcccccaaaaggagtttatctgatatgttttatagtagaatactacaaattctggagcttccagagttttttatctgtttcctaaaatatatcttaccccatattctagagctcctgtactaaattacttgcaaaactgagggagtgcttcagggatgaagatagcacgctccagcatggctgcctcatttacctaaaggtaaagccgtgcaaaattaatccatataaagcagtgtcaaatctgaatcaaagttctgaacaagacttcaaataaatatgagtgcttttatggagctgattttaataatttacctcttctgaaacattccttcaacagtgtatcgtgtgggaaaatattatgagcatgagggtgggtggtaggaggaggcagccacaacctcccggggctctttgttcccagcatgaagaggctcctttccgtggcctgaaggttaacaccctggtccccctgcccccatcctctacctgtcactctgagtcgatgtcacagttcctgcacacagacaaacaggctgccctggcccgtctgcctgaccttggacagccctcagatcaaatctggttattaatattggggagagtcaaaatgcaatcttccagacactggagaattgagctagaaattatgcagtaggcactccctgtcaataagaagcatccagatgctaaggcttaaagtggtcacctggacctgtgtgggagttaagagaaactttttttttttccctgttccatgaatgctatggagagaagtttgcttagggtctttatatgcttagcttatctatccttacactttcaattatttttggactctttgctttataagagttcttatatagtaatccatttgcaggctaaagcagatataattggaaaaatactgccctttcatagtcatggaaaatattttacaaatgggatgaaatacttttaatacccttattgtagttcaatgtgcatataattttaaccaggggttctcattctttgtaattgtccctataactttctctcggaatatatccataatctagactaaaaagggagaaatatgaaaaatcatttaaatgcctagacaaatactaaatgtgctacagtaataaatgcattactctttcaaatcactacaaaaattaaagaggaaatttaatcttatatttcttccataatttacccaatcatttccatattctcaggtgaagggtttcttgataagagagttatgtgcctttcatgatagtatcaatattaatgacttggtcaaaaatcactgtcacaggagtctcaatattccctataaaaatatattttgaaaaccatcattaagctttttatttaagtagagacccaaaatgatactaatgtagaaaaggcattttttctggggaagaggggtggggaaaggatggactgagagtttggggttgacatatgcaaactattagacatagacaaaaacaacaaggtcctactgtacagcacagggatattatctgtattgataattatatatttgatattatatataattattaaatatattgatattgtatatttttcaatgttctgtgataaaccataatggaaaagaatataaaaagaatgtgtatacacacacacacacacatatatatacatataactgaatcactttgctatacagcagaaattaatatagtattataaaacaactataatttaaatataagaaaatgcacttcaaatgcagggaagaattttttgtctgcaagacagacttttttttaagtggtaaaatccttttcagtaaaaaaaagggtatcttcttttgatttttgttgtcttctggtcgccacatttttttcctttgagtatgtatccagactaatgcatcttaatgatatatttttttgcctactgaactattcatttgcgctgcctgtgaaggtatgttcagaggcgtcatgccacccaccggcatggagactccatggtatgtagaattatgttacaatcaacaacccgactctttcagcctcctggtattttatatcagttgcttcctcaagcaacacaaatccactaatgctttaatttgtgacactgctaactggtattaacagattatgactatggaatgcctttgcatgcaaaccggcatagacagataatatgtctgtcatcataaaacaaaatgctctaggtcacacaaacatataacgctgtcctacatcttttactcgagcacaaacctccaaaggtttatagcacgcttacgtgtgcttgcagaaccttactcttagataaccaagtgcccagggcttggtccaggcagcacaggaaatttctattctgcattgatctacatgtgtcagctggacccaagtgactgatcaagctaatcaagttattagcaagatcttgaaataatcagcttgatttttttaagggaataacgcaagttatttcattagcctgctctttcagtttatgagaagggggatttttttttttttttttttgagggacacaggctacatgtccagtggaactcagatacaatttggtattggcattttatagtagatcaggggtcagcacagacttgattatttcctgttgatcgacaaaaaaaggaacttctttatgaaataggcaaagacctaatcttcaacgtgtaagtgaagtaacttttccagttagtttcactggtttactccagttaatacagtaacttttccagagttacgtgttctgacaatgtagagtctcttgcttatgaaattgggcaccatatttatttccttcttttgagcaatggttatcattgtagctgccagtgcatctgtattagatgccatattgggagaaaagaaaagtacagatattaaaagaaaattgtcaaattatagaccatacaaaatatggcctctctcataaacaaaataaagtgatatatacacacatggtcgcgccaggggtaaagaacctgcctgtcagtacaggagatataagagacatgggctcaatccctcagttgggaagttccttggagaagggcatggcaatccacttcagtattcttgcctggagaatcccacagacagaggaacctggtaggctatggttcatagggtcagaaggagtcagatacgactgaagtgacttagcatgcacacgtgtccatagggtcacacaaagttggacacaactgaagggatctagcatgcacacacatacatacttacatctatacctacacacacacatccttcacacataccatgcacacatttatttatatccacctctatggagagaaaaaaaagagggaatttgctggtatgaagtaaaactctaaaaacaaacctcagaatctgccttcctagaatagcaagaaaatgagaaattgcagaatcattacagtgaactacaaatgaacgtataacccagcaggcctgtggaagccagccctcgggagacctataagattcctgttcagaaaatagactatatatctgctgcctggggatatctttgtgtacaaggagagtggatttctgcaactgtgatgaggcaaagtgttattccaaaactttaccagcaaagatatccctaccaaattcaatcaaggggccttagacttttttatttttttaaccaacatctggagagtggtttcttggcccgacagttcacaaaagtgccagacttttcaacaaaagaacagctgttttgtgaagaaaggttttctttataaaggtttgccatttttcctactgaaattgaatttttttttttttaatatcaaaagaggtcagattcctgtccttagatgcaaaaccaggagcaggacagagggcaatgccttccatgacttgctcagagtatacaggatcgacagactctagcaaagtctcagtgtgggaatggagagaacacaggtgaatacacaggactgcttcctcttctgaacatggagggacagatgctaacagagctgaggctggtacaaccaccacagtcactgctgtctcaggaatcctgtccccagtgacctgcaaagcgtactagtttcgtgatcctcaaatccaactgacaatcagcatcatccattcaaatgaaaagatttctggctgcaccccagagagggtgggccttggtaccaccatgttttaaaagtgctaacagggaatctcatattcaactttagttgattcaacttgtacagacattctgcacaaaccagtcaactggatgtgcagctgtttctagattgtcttttcacaaaaacacttcatgagccccaaaagtttgaaagcgcttacattctgatcaaatctcactggtaaataaatgactttttctataggacagtcaatatctagtgaagtcaactcagttcaaggacttcccaggtggtgctagtggtaaagaacttgcctgtcaatgcaggagacataagagatgtgggttcaatccctgggtcgggaagatcccctggagaaggaaatggcaagccactccagtattcttgcctggaaaatcccaccagaggagcctggtggggtacaagtcaatagggttgcaaagagtcggacatgacagaagctacttagcatgcaagtaattcagttccgccctggctactttcctaactgcctcaatacaggttctcattcaaattcttcactttcctgtggtacatatacacaatggagtattactcagccataaaaaagaatacatgtgaatcagttctaatgaggtggatgaaactggagcctattatacagagtgaagtaagccagaaagaaaaacaccaatacagtacactaacgcatatgtatggaatttagaaagatggtaacgataaccctgtatgcaagacagcaaaagagacacagatgtatggtcttttggactctgtgggagagggtgagggtggaatgatttgggagaatggcattgaaatatgtataatatcatatgtgaaatagctcgccagtccaggttcgatgcatgatacaagatttttggggctggtgcactgggacgacccagagagacagtatggggagggaggagggaaggttcaggatggggaacacgtgtacacccgtggcagattcatgttgatgtatggcaaaactaatacaatattgtaaagtaactagcctccaattaagataaatttatatcaaaaaaattcttcactttcatccaagattagaagaagagtttgatttacataaatacctatgtactaatgacacaaatgcatgttccagatcaaaaacaactacttatttgtttacaatggtaaataactatttctttacatcatgtgtgaatatgtgtttaatgtttgtctactactctaaactgtaagttccatcaagcaaggcctctgtctgtcttgtttgacacaacatccttactttccagcaaagggcccgacagagtggtctctcaaatgaataagagacatgattagtcaaataaataaataaaccatagggcgttcagagatgtgattcagttatttctctatatacaattactgagaaatatcaacaacctcagatatgcggttgacaccactctaatgacagaaagtgaagagaaacttgatgaaagtgaaagaggagagtgaaaaagctggcttaaaactcaatattcaaaaacgaaagaagatcatggcatctagtcgcatcacttcatggcaaatagatggggaaaaaatggaaacagtgacagactttattttcttgggctccaaaattactgcagatggtgactgcggttatgaattttaaaaaaaggcttgttccttggaagaaaagctatgataaacctaaacagcatattaaaaagcagagacatcactttgccaacaaaagcctgtatagtcaaagctatggtttctccagtagtcatgtatagatgtgagagttggaagaactgatagcttaagaattgatgcttttgaacttaatgctcttaagactcttgagattcccttggatactaaggagatcaaaccagtcaatcctaaaggaaatcaaccctgaatattcattgaaaggactgacactgaagttgaagcaccaatactttgggcacttgatgccaagagccgactcattagaaaagaccctgatgctgggaaacattgagggcaggaggagaaggggacgacagaggatgagacatgactgagcaactgaacaacaacaacagtacagttactgggtttcccaggtggcactagtgataaggaacccgcctgccaatgtaggagacaccagtttgatccctgggtcaggaagatcccttggaggagggcatggcaacccattccagtgttcttacctggagaatcccatggacagaggagcctggcagcctacagtccacaggttgcatgactgaagcaacttaacaggcatgcattcatatgattactacactacttcaagaaaaattcaagaaaaatttgtaaatatatacctgctgattaaccaaaaccatggaaaatctgaaaccagataaatatgtgtaactatctctgcaatttaagatgaaatactcattacagctcaggaaaattcagctctgagaaccatggacatgattacctgtaaatcagatctcagtgatttgttaatgcctactttctaatcatcatggtaacacagagcccattttatagacgaaaaaactgtggcagcagccaaaagacagaagcaaaattaagaccagacacagaagctttaagcattcggttttcagctgtgtgagctccgcttactactactcatttgcaaattcacacttgccagatttgaaaagtggtatttaaaagtgtcatacacagttccttttctgtgggcaaacttctaagaaagaatgggtattgaatttaaagcacatgaaaggatatacaaatagttattttctcggagctgtatatacccattttcaagtggatgagtatagatacattcttcttcaaacaaatttcaattgaaggccaactggagagagaaagttaagaatggcttttcaggaatgacaagtcctggatataacagtgtaactgagtgcgctcacagaaattaaaaaggaaagtatcttaccgataataagaaaagcagaagttatctccaagtacaaaaagcaatgccgatggagttgatgtgctgacaagacctgagtaatattttccacatataagaaaagctttcatctcagaatgcattttcaaagctatttttgtaccttaattaagatctccagaactcactggagtgttttttttctccatttactaatatattaactaaggcaccaaaatgcttgccaaaaaccacataaagagcaagaaagtcagctggacacttgaagacagaaaatgcgtaactcttttaaacttttcttgagttatagaagactacagggagatagcagaagatgaaagagacaggggtttgatccctgggtctggaagatctcctggaggagggcatggcaacccactccagtattcttgcttggagaatccaatgcaccgggaagcctggtgggctacaatctataggtcacagaagagttggacatgcacttacgcacagggagatagatgggcatatcttccaccgcctttctctgaaacatcactccacacctcccaccacactccattcccaatatactaatagtaggaaggcatcaaaagtgatacccaccttgtcaagacttattaagctcatcagcgttcctagacataaatgccaaaacagtcatccagtctttttagtctcactgtgttttagactcaagaaagtagctccagggaatcttaagcctgagataacatgggagcttatcatgctttcttgcttcatttttctttaaagacttttttttttggtcagagtaaaacagaaagaagaaattatgtaatgttatgttctaacagtaggaacactggcagctcaagccctgacctcaccctacccatgtcaataggctttatgaaaagcagaaggtctcaggaaattgaaaacgccaaggtcaatttcaaatgtttaaataaaatagggtgatgcttgaaatagctacagataaaataccaaccatttccactgattaattagattagcttttagagacaagtatatttatgcttttacatcaagaaagagaaaaaaaatccttctagttagcaaaaaaaaaaaaagtaatatttccctttgtccatatatctaccactctgaaaatgtaaacttcatgctcacaaaacatcatataagtgagaagagggaggcaagagggagaaaaaatttaaattatactgtgattgtgcattatttttcaacaatgggacatcttttacttgagaagaaacaaatagccactttatcacagttctgcaaggcaggaatctaatttcttccctaaataccacaggaaatctaaatattaactttctgaatgacacagaggagtaaacagtgctaaaatgtgttacacagaggactaaaaatgtccctacaaacttctggaatccagaaaagctgttaacagagacaattcacaagggaaaataaagcacagataaaaagcggtgtgtattttcttctaaaaaacctggagagcttcttgcagacagggatggcttcatatagcctctgtctgttttattcatcaccacagtgcaatgaggacaagcaagcttttgtgtatcactagaacttcagtctagtcctacttccctggtgatgctgatggtcaagaatctgcctgagacctgggttcagtgactgggccaggaagatccccagaaaaagggaatggcaacccattccagcattcttgtttggaaaagcctatggacagagaagcctggcgtgctgcagtccatggggtcacaaacatgactgagagacagaacaacagcaacgcaggacctcaatctgacaaaatgtgtttcagtaattatcattaaatataccagttttcactcagtatggagaattcaccaccaaagaacactgtatcaaccagataaaggcttatattctgacatagaaaaaaaacctacatatggctatcagcgatttttctaatttgccatccctcgctatctcctccccaaatctctaaatctctatctatctcatcattacttctcctctcacaggctgcccttcccaaagatcaacggttacagtcactcttacattcgtgcccttctgccacaaacaaggccttcttatccaggcattcttctcaaagtatcttcactgtaacagagtgactgtgggtgctggagtcagtcgatctgagtataaatcctgacccagctggcactgttaccagctatgtaaccttggatcaattaattaagtgttcattgccttagtttcctcatcttcaaaatgggcataattatacaggtttactgctagaatgaaaagagttaatatatttaagaacttagattatctgccacctagtaagtactcagtagatgttcaagttaattttctcactggacttttattagccatggagaaaaagatgaataaggaaaagtttatcactctcaagtgataaacgtttgtacaattctttaagaaaagggaaaaggagctgatcagatacaagtaagaagtgaccagcagtactgagtccagttaataccagtgactgttgtttcaggaattccacttgtaggtataaaaccaagagaaaagaaaacacatatccgcaatatccatacaaaaacctatacataaatgctcacagtttcattattcataatagccaaaaagttgaaacaactcaaatgcccataaactgataaaagggtaaataaaatgtagtctatccacaccatgggaattccataataaaaaggtatgaaatactgactcataccacaatatagatgaatcttgaaaacactacattaagtgaaagaagcccatcacaaagaacaacatataggatgattctagactatatagacagagtgtaattagtggttggaaaggccagggctggggaggttgggattaccaggcggtgggaaggggtagagataaatagcataggatttcttttggagtattgaaaatgttcaaaaatcaattgtggtgacggctgcataattctgtgactattctaaaaaaacaattaattggatgctttaaacagatgaattttgtgatacgtgaattatatctcaataaatgtgctgaaaataaaacatcaccacagccaagcagaatacaatggcctcaacattcactgccctgtccacatggtaggttgggcttccctggtggctcaaaggataaagcacctgcctgcagtgtgggagacccaggttcgattcctgggtcaggaaaatcccctgtagaaggaaatggcaacccattccagtacccttgcctggaaaatcccatggatggagaagcctggtaggctaacgtctatgggcttgcaaagagtcggacacgactaagcgactttactttcttctttcttttccattggttccttccttctctattttagaactgatttcttgagacttttactcacattttgctaaataatttcaagcttaattattgagattgctgtcttatcctatcatattcccctatggacatctgagagttcatcaatttaagaaggtatttgttctgattacctaattcccagaacttcaaggatccttttgagtctaagtgtcttgctgtatctgttgtgacttgaaggcaaagaaaagaacagagtactaattagatagagattactttaagaaactctttgcattaaaagatgatttttcacaagaaagtgctcaagcctttgtaaaaagatacctgctctaatagtggaaccaggagctcccttctgtaaggccttctgaatgtgcctcccacatcaatggaggccattgactttctggagcacctaccacctatcacttttaccaattcacatcctgttccctggggcttcctaggtggctcagtgggtaaaacaatctgcctgcaatgtaggagatgtgggttcaattcctgagtcaggaagatttccctagaggagggcatgacaacccactccagtactcttgctgggagaatcccttgggcaaatgaagtgactgagcatgctgttccttgaaactttgattagtcatgtgtacatacaaaactgatttcagggcttgttgacgaatcttgcacaacatcatcaaaggtttattatctctagaaactgagaacacttacaatggacaggaagagatttctgtgatctactttaaaacaaaataagtgggcattaatgattaactcaaaatctccatcagtttttaaaataggtcttaggatactgtattctgactcctcgctctctgtctcttcaccaccccacctccccgccacacacacacgtgtgcatggaatttgttccagtgtttgagcaaaataggcataaataggtctccttggatacatactgaaaacatcattggaatactggcattttgcctttttaatgaccaaacacatgagaactgaaatatatccacattcttctatactcactgctaaagaattaaatgattcactttttagaaaagtgttaacagacttgaaaaaaaatcaatttcaatgtacttctgtatcagtgcttttacaataagttgcaaagccattacatttaaagaggtagccgtgcttctactggaagaaatggaatgacctagtactcgctacaggaacttgaaagtaaatattacacctgagagtctattttgaaacatgcgtgcgttcacgctaagtcacttcagttgtgtctgactcattgtcagcacaatgagtgccctctggactgcagctcgccagactcctagtccatggcattctccaggcaaggatactggagtgggttaccatgccctcctccaggggatcttcccgacccaggcgtcgaacctgcatctctttatctctcctgcattggcaagcaggatctttactactaccaccacctgggaagcccttttgaaatatacatctaagtaaatgtggacacaatgaagcaataggaagagatttttgcgtttatgactttaaagatggcaattctattgccaagttaagaatggatactgcttcataaaactcatcttagtttttctaatattgaaggaattaacagagtcaaagtctatttttctgggaaaaaaagttatttgtgaaatctctttggatctatttttaaggaatttggttataagcctggggagtatcttctcaggaaatattcatcatggaaaaacttggtacaattgttccatccaaatgtgtttttttaattacttaatttgctaataaaaattacaataaaccacaaacaaataaattaaaccagaacttgcttttatccaaattctttctcaaaggacactgagggacctctgtttacatagtagtgatagcatctcatactaagtaggagagcgttttctctcttccaaagtttgtatagtaccaattcaccaaatgaaatcaattctgagaggtatattccactgtttatgtatttcccattttagcatattaattttatgttttaaaagacagaggacaaacttacagacataaagagggaaagcaagagtgggatgaattgggagatttggactgacatatatatactattgataccatgtgtaaagtacataactaatgagaacctactatacatagctcaggaaactctactcagtgctctgtgttgaccctaaatgcaaaggaaatccaaaaaagaaggtgtgtatgtaaacatatagctgattcattttgttgtacagtagaaactaatacaccattgtaaagcaactatactccaatttttaaaaatttaaataaaaatagaaaacaacaatatttatttggtgtaaattggggaatcattctccccttccatcgtgtctggtgtccctcacgctgttattcagtggtaagtgctaagtttcaggtatgatatgttgagtttaaggtggctcagatggtaaggaacctgcctgacaatgcagaagacatgggttcagctcctgggtcaggagatcccctgaagaagggaacggcaccccactccagtattcttggctggagaattccatggacagaggagcctggcggactacagtccatggggttgcaagagttgacacaattgattgaggaacactttcactttttcactttcactttaaaggagatactttgtaaaccaacactctttcagaagtgatggcaattagacttgttatcagattccccacaactgaacaatgaagacttcaggccctaaggacgcatgctagtgttctctgcaggcctgccaaagcaatagtgagaaatattggaagtctttgaaagatactgcccaccataattatcaaaatgtccttacatcctttacacacactggctaccgatattgggagtctctcctgccaatagttctgtcacttcaacaactgaaactattcttacttttcattaaaagattattcatcactgaatatactcaactacagtgctgtcaatgactgagaattttttttgcaggattggaagccagattcaggaaggcaaagatttcctcaagcatctttcaggtcagttcagttcagttcagttcagtctctcagtcgtgtccgactctttgcgaccccatgaatcacagcacgccaggcctccctgtccatcaccaactcctggagttcactcagactcacgtccatcgagtcagtgatgccatccagccatctcatcctctgtcgtccccttctcatcctgcccccaatccctcccagcatcaaagtcttttccaatgagtcaactctttgcatgagatggccaaagtactggagcttcagctttagcatcattccttccaaagcaatcccagggctgatctccttcagaatggactggttggatctccttgcagtccaagggactctcaagagtcttctccaacaccacagttcaaaagcatcaattcttcagcactcagctttcttcacagtccaactctcacatccatacatgaccactggaaaaaccatagccttgactagacggaccttagtccgcaaagtaatgtctctgcttttgaatgtgctatctaggttggtcataacttttcttccaaggagtaagtgtcttttaatttcatggctgcagtcaccatctgcagtgattttggagccccccaaaaataaagtctgacactgttaacactgtttccccatctatttcccatgaagtgatgggactggatgccatgatcttcgtgttctgaatgttgagctttaagccaacattttcactctcctctttcactttcatcaagaggctttttagttcctcttcactttctgccataagggtggtgtcatctgcatatctgaggttattgatatttctcccggaaatcttgattccagcttgtgtttcttccagtccagcgtttctcatgatgtactctgcatataagttaaataagcagggtgacaatatacagccttgacgtactccttttcctatttggaaccagtctattgttccatgtccagttctaactgttgcttcctgacctgcatatagatttctcaagaggcagtcaggtggtctggtattcccatctcagaatcacagtttattgtgatccacatagtcaaaggctttggcatagtcaataaaacagaaatagatgtttttctggaattctcttgctttttccatgatccagcggatgtttaagttcatgtcaatggttcgaaaaagatgtggaccagttctctggaaacattagcaagttctcaaggaggagaaagaggaagcagggagtgcactagaaacctacagtggaggactccccctggtgttcttgtgattaaggatccatctgccaatgcagaagacacaggtttgacccctggtctgggaagatcccacatgttgcggagcaactaagcctgggagccacaactactgagcctgcatgctgcagctactgaagtccatgcacccagagcctgtgctttacaacaagagaagccaccgaaatgagaagcccgtgcaccacaactagaaagtagcccccactcactgcaactagcaaagcccgagtgcagcaacaaagacccagtgtagccaaaataaataaataaaaataaaggataaagagattttaaaaagaaaaaaagaaacctatggtggaaagaaaattcctggaaacttggaacaaaagggatcaaagtaagaagtagaagatacaagttaaaaaaaaaattcaaaacaagattatcttttaaaatgctaggtacatagcaaatgaataggacttcctccagtagttataaggatgttgggaaaaggaaagagaagactggggtcctgggtagagactagactgtgcttttacttgttgctctggaggaagttaaatgcttagggaggcacattccctctttcaggtcagcggggtaccatttagtacattactgctgaagtaccctggtgacctgaatgaattaaggcagcttctgaaggtgcttaacttgcaagcactgagagctcaggcactcgaagtgataaatattctatgagtcctttctatttaatataccaagcacccccaaaatgtcaggaaaaggaagtttctttaaagagaaagaattatgttgtgacagtaaacaggtaacagttttaaacagctgtgtctccttccagtttggagatgctcccaaaagctgtaagttcatcatactgctgctgctgcattatgctagctgactgcttttgtgggtgtaaaccctactactgagctcttttgttacatcacagttactgctgctgctgctaagtcgcttcagtcatgtccgactctgtgcgactccatagacggcagcccaccaggctcccccatccctgggattctccaggcaagcaccctggagtgggttgccatttccttctccaatgcaggaaagtgaaaagtgaaagtgaagacgctcagtcgtgtccaactcttctcgaccccatggactacagcccaccaggctcctctatccatgggattttccaggcaagagtactggagtgggtgccatcgccttctccgtacatcacaattacaggatcttaaaaatgatctgtcacttgaagggataaaagtggactcccaagtgaattttttttaaagtcactcagtgctgtccgactctgtgtgactctgtggactgcagcccaccagctcttctgtccatggaattctccaggcaagaatactggagtgggtagccattcctttctccaggggaccttcctgactcaggaaaagaacctgggtctcctgcactgcagacagattctttaccgaaggagctaggagggaagcccaacagtatggaagattcaacctgaaagtgttagtagctcggtcatgtccaactctttgcaaccccatggactgtagcccaccagactcctcagtccatgggattctccaggcaagaatactggagtgggttgtcatgctcttctccaggggatctttcccacccagggactaaacccaagtctctgacattgcaggcaaattctttactgtttgagccacaagggaagcccaaagacagatgaagtgatgtgaagtgaaagtcgctcagtcatgtctgattctttgtgaccatatggactgtagcctgccaggctcctctgtccatagaattctccaggtaagaatactggagtgggtagctgttcccttctctaggagatcttcccaacccaggagctgaacccaggtctcccacattgcaggtggattctttaccgtttgagccaccagggaagcccatagtatattctatgcttccaaatatttccaatgaaagtaagtctttagaaaaatatgtatcaataaaataataatatgatctcaatacacatttatatttacatatacatatttaatataggtattatattcaaagctgcaaaagtacttttcctttaaagaaacctagaatattaataaagtattataaaactaagtgaaatggaatgttaaccacatacagtagttactatcagtgacaacagaactgtcatcacaataatttacctttaagtagaattctcatcaatagcattgtaaagggaactcacagtctccaagactctaagtaagactctaagttacatctttgttctaaaagggaattgactgaagttttaatttgacacattttgcatctttagcatcctcatgtttaaagaaggatgtagcaccatcctcatgtttaaagaacaacatgaatcttccaactaaaagagaagctctagttcgctccgtaattcccaccataacctttgtctgaaactgactcacaaagtcttacattgcaaaagagcaatgagtcagccaagacatattgttctacagctactgatgatccaagaacgcagtcacacctagccttttgaccaaccattgatgaataaaaacacggaagcttttgagggctcgtatatgattgttgttgtttagtcgctaagtcctgctcgattctctgagagcccacgggctgcggcatgccatgcattcctgtccttcaccatctcccagagtttgctcaaagtcacgtccattgagtctgtgatgctatctaaccatctcatcctctgccgcccccttctcattttgccttccatctttcccagcaacagggtctttttcaatgagcaggctcttcacagcaggtggccaaagtaatggagcttcagcttcagaataggtccttccgatgaatattcagggtttattttctttaggatttagtatatggattcaacccttaatttgattaaaggctctgccacattggaagaacagagtcatctaggaagcatcaccttaagagaacatggtttgtatccttcctcattaatggggctatctccataaacagagacatttaaaaacccagtccaaacaaagtgctcaatgaatgtttctgtatttatcagaagtaagacttgggatgtcatttgggtattctgcaaacagaacatcaatcacgatgttcctccttggttacacaatctatgaagatgtttcccagcaggttcttgggaactgccaactgttgctcttcttttgaataaatcacatcaccataaggtctctggaaatacactgataattcaggggtgaaagaagtgccttttgaaggcttgaattatctgaataatgaacaaatctccacgtctaattgaactcagcctgagcacaggctcagacttcaagcaaacttggtaaagcatttccagtagaactcaggcaggccagatgttttggaagcagaatcgcagtcattatgcacatgccagttcctcctcgctccacccggggccaagaccctttcagcagcatgaggcctgcttaacgtatgactttggccgccttactgcatggcatcccagcacccacgcaagcatttcggtgattttaaacaagctccactaacaaggacaattatatggaagccacagaaactagtggagagagcacattcatcatgagatataaactctgtccgcatttcctgaaatgatctcagggtgggagatacatagggatttacaactctgggttaaatgcaggagacatgggttctatccctgggtcaggaaaatcccctggagaaggaaatggcaacccacttcagtattcttgtctggaaaatcccatggacagaggaggctagtgggctatagcccatggggtcgcagagacagacattactgagtgactaacactttctacacttcacatgagacaatgagcacaacttatacaaacactgtaacataaatcccaaagtctgagttgacatggtcctggggtaaattaatggtagtgccagtttttactacttttctgaggtggaggttgggtgtgatatgtgatgtgtgtgtgtgtgtgtttagaaggagggagatgaaggaagctgttagagtcggccaccaccctccatatccccatacctgacataaaaactggttccccctcatacattagaaattcacccagattaagtggttcagttaaaacgaaatgcactctgggaaaaaacctgagagtcatttacaccttttaatgcactactctgcttttacagaagggtgtccttcccccttaattaaaaggatgctcgttttctttggggaattagatgggtgatctctcaacacagagttatttccatgaagagaagatctaggtaggagaaaacagtaaagatttcagcaaagagagaagaggataacagtgaatgcctgatgtgtggggatatggcaggaccagttaaggaaagacatgtcaaaaataaaatcagggagtcccagtgacacgatttgctttctttaaattttatttgggtttggtaacagttccacacatgcaatactgttttatctctcctgacatggacatgataagttgtgaatatctggcctaaagtcatccttctacagattggcatgtatctataggtgtgtgtatctatctatattaatatatagatacagaaatataaatatatatatatagagagagaggtgtgtgtgtatttggataaacagatattttttatccttttttccctactggaactcaaagagagttctcaactcatactgtaatatatatttcttgctttgtgaacacagtgagaacatccatatttgtgctagagtagccatgttttaacacatggtgtgcttcagtaaatatcaagcttaaaaacagaagtagacaaagtagtaggtctggccaattacattgtgatctgaaaatactagtgatttattagttgctattagctaaccagctgatctctatttgatctgtgtatttattagttataagtattaagccagcatgtattgttctactacaggaactttttcagcctctgccttgctttttatatgaaaatacaataaaataatttgagttgtgattacttaaaaaaaaaataaatcctgcagctggaattaaatttcacactgaaattcaaccttgaaaggaacagaaatatgaaactaatgcaaaaagtgcaaacatttccatattcaggttaatgtttagcaacagaaaagaataacttttgtttatctctgaaaacagctttctttatctaaacaaatgactagaataagattaagaaaaacctgttttggttttttagatacacacacatattccaatttccttttacacaatgacttttatgcaaataggtaccacacaatctcctgacctcttttaccatcacacccggacaatgacagttcaataattgaaatggtacatatcgggtatatttgattttaatttgcaaagttggtcttaggcctattgaaatgaaaatgcttatgattctttgttaattccaaactgatcagattattatacttcttaccagtttaataaaaaaaaacgtaaaaggcaagtgaagctaattataccactttttatttccttgccatatacattgcccaatgtgtggtgtttttttttttttgcattctcttctgtgaccctcccccacaccttgattttagttcttaacctggattctttcatccacaacatggataatgagaaaactccaaacatgttccttgggggactgttacactaaaagttacgtaggactaaatcccacgtgtcttcctttgctcaccatggagacgggagattcattcaccgccctcagccaatttgaaatccaaatatgaaaacagccttatggaattcagacagatgactctccttcacaactagcagatgcaagaagaaaaaaaaagactagtataattaagcttttacctttgatccagtgaagctgtgaacacctcatttaaaaatacatataaaagcagctgaagcacaggtgtggcaagcatatttgcacacccagcacaggatggcagtcaaccaatcagctggccagaaaagtttcagccattctaaggcaagaataaggtaaactgtgaatctgaaatattaccagagtcttgtttgttctcagttggaatgtggagtgctcagtggttttcactacatctttctactggacactttagaaaaggattgagatcacttaaggggtagactaaattgcagtgcattttttaatgaggattggaagtagtttctttaatacatttctcaataaatgcattagtccattattcatcttacaaatatttattgaggactcattatgtgaatatcaattgacaggaatttgtagaggatgcaaaggcgtgaaattagaaaaatataatcaaatctaataaagtggttagctgagaatactgttttggcattatacagatatagatacacacaggggcttccctggtggctcagacggtaaacaatctgcctgcaatgtagaagacctgggtttgattcctgggttgggaagatcctttggagaagggaatggccacccactccagtactcttgcctggagaatttcatggacagaggagcctggtgggctacagtccatggggtcacaaagagtcaaacacaaacgagtgactaacactttcacttcatatattcagtactgattaacctcattttaaatatactttcagacattaaaagagaagattaagtgcaatctgcagtttcaatttattgtttaaatttcttagcccaattttgcttcatcgtttaaatttctggaggaaaaataagatcaaaatttgaatagtgcctaatgtttcagagacgtttgcttgaagaaatgagcaagcttttcttcacaacaacaaaattcctttacaaaaaatcctaaggaaaagaatactgccaagaaaacgaatgcagctttgtttgtttttgtagtcatcgttagcaatagacataaagttattcctttcttttttttttggagcccatatggaaagatcatcaacacattctgcctctgggttctttgccaaaataccataacccacaagccttctaccttaaacatgaaaggaaaggtgttgttctggtcaaataaagaaataatttttactagcatacgtctaatgttaaagctgcttaaatcctgccaaatacattaaaacaacatctgtaaaacagattttcattaaattgatcaggttaaagttaagcagctaggcagatgatgcttttaagctaccccttaacctttaacctctaacctccttaaactggaataaggacacacacttctctgaggtaagactgtttcaggttgaccatgcaagaggtaaagtggcccattcaaattgccctgacacatccccacatttgggagtgttatgaatcaatatgctgtcaatgagaagaactgtttttctcccagccatgtatttatctgtcttttcactgctacttgtcactttcccttaaagtctgaataattcacaatgcaaaatgatgtataattaaactcctaatgaaaatgaattttatataagcaattattgtctagtcattagctcagacactgttttaagtccaattttaatattttcaccatattataaaccatcattttttccaggcctaggccaatttgttagggtctcatttaaaagcaattaatgttacttatagagcaattttattttgcctacacaggctgaccaagcttgctaatgtcctcattactgctcttgaaaatcctctggatctgacacacagtttctgtgaatcagtttaaaaactgcatcctcaacacattgctactctggaggaattttttctagtgactgctagaataaataaatgctctttgaaggctgatgcaaaataagagtccagctgcccaatactgagtttcagtagctccaatatttatctctttaatctttttaattcaaggtaagcttgttcacagtgtgtttttatttgtttgctgaccatttggagacattaccccacaaggacacttaggtatttaagagataagtaaataaagaagatggtggggagagttaatttgtatatgacacaacattttgaaggtaagagtatatatagctgggcttcccaggtggctcagtggtaaaggatctgcctgcaagtgcaggagacacagggtcactcctgatacaggaagaccacatataatgcagagcaactaagcctgtgcacctcagctattgagcctgtgctcgagagcctgggagccacactactgaagtctcagcaccctagagcctgtattccacgagagaaaccactgcaacgagaagcctgagcagcgcaactagacagtagcccccactcactgcaactagaacaaagcccacacagcaatgaagattcagcacagccaaaaatgaaatagataaaaatttaaaagagagtacatatagcctttggttctggtatctcaagctctctctgctttaagggcctattcataaccaagttctatctcatctggttgttatacaatcaaagacaaaatccagccctctctgaaggggaacttcaagggtaaccctggcacctagcaaattgctctgcagacagtgagggtggtcagtccatattcatggataaacttaacacacacatacacacatgtaaataactgtccagcaatgagactaaatagcctttcctgggaaaatcaacaagaatgctctacctttctttagcttcccacatgagattaataaagcacaaaattttgtatatttatatcttctattcacaacatgttaatttaaagtgttagagctgtgtgaatataagcacagttcatgaatattctatatagctcccagggtcgagatctattatttatacaaacttaatgtgttttttttttctcccaggtattctaaaagttttaatagataaggaatcaacagaagaaaagttgacaattgaacagctgtcagctgtggctgtaaaagcgaagaattataatcattctattctgttttcaataccatcaacttagaagttttccatcttatgttgagggcctgcactccccttaaattgtgtaacccaaatctaatgctttcgttattgatccatggagcaccaacatcacagacacaatgttacaaattctcacaccacgactttaggttttcaccctcggtacatcaatccagcatttgaacttcaagaaacaacccaaacaaatagtggcaggccaacccgaataaatactgcctgcacctgccccagatagtcacattctgctctttttgtggtctgtttatagtttgaaagcatatttgaagagtcgcaggtatcataatcgccgggtgattcctgatagtatagttatcactgatttctagtataaatcaatagataacacttgcaaaatggattttgcaatcatattagagcttgttacagtgactaatggtttgcaatattttctgaattttaatatcctctggacaaaagaagtttttaataagttaccaagttattcatcatagaaatcaatctgttcccactgtacatgaaccaagacaatcaggccaatccagtacacaaactgcagaaaataaattatccagtaattagggttcagaagaagtcaagtcaaggtatgtgacaaataagattcaacacttggacatattcattacatctgcaaagcttcttcccctataaaagtgttatttgccatttaatgaacacttttacctgtgccacacccataaggggacgggataaaaacattactagcttgggaagtcaggcaaaataacaacagagttaagcagaagactttcaactgatcctaagggagggtgtctttactcagtaccaccagaaacttacaggaaaacacacacacacaatgtttggatcatccttgtcaccaaacaaaaggtgatgcattcacaaggcagtgctgtttttgtcctctgctccctgaaaccattcatacttagccaagagtggcgctcggttgttgtttttaatcattcaataaaaagaggtttaagagtattattttataggtggaaacactcaaaaaagtgatgttatttcagggcaaccagtaaagtgatcagtcccacagagacaggtgtaaaagggacatacagcaaatcctttaaataaattctccaattccatctatttcaatagactctgcatttagtaacgtgaagcagagactgtggctcttgcccttctatttttttttctcctctctcctttttccttaacttgcagatctgcgctccaagctccgaaacagttaattccctcctccactccatgccaagagaaatggatgtcactgcttaccttgtagagcttcagggccgcctcgtgcctgtgattggtggtgtgcaagcgtaatttgtccacgctgttggtgtagtagtcacaggcattgcacttgaggtgaacggggttgccaatggcaatgcacttcagcctccattcattacttttgcccccttctttaatgtgagccaccagttgatatttctgcatatgtttatcagtcttgcagtgaagctggaagttggctttgagctgagtgttgtagttacagagcttgcactggtagatatctccaattacagccctccattcctcttcagggagagagcgctcgctgctcacatgcacgcttagggcctccaggctgtcagaggtgaatttgttgcaaacagcacactggaatagcttcagcgctgggtcactgatataaggtgacagctctcctgcagtaaggagggacaggtcatcacctattagctgaccactggcaagccggatttcaggcggcagctcattatttactacaggaaaaaaaaaattaaaaggaaaaatagagactggaaaacacagtgcgcacaaaggaatctgtaaaataaagtcttgacaaggaatgtgctttctctagagcttaaactataaaaagccgtaataggattgaatcaggatcaattacaatcatccctttcaacttctaaattccctcatcagatagctttaattactcctactgggcatgatgtcattctgaaatttgtattttcgagggcaggaaagtggatcaataccataacaaaacagtcacgtgcttgcaatttaagcgcccagctaaacttacacaagcgctaattgttatttcgcaatttgttgaaaagcttgatgagatttggctaatactgtatgcatgcctgtaatctactgccaaatgtctgggataaggtaatggtattactgtttctttaattatcttcaatcacagacacaaaaatcttttttcaaaaatatttcatgaaaaataatggcataccattcagaagctcaagtttgatatcttagggcataattgacgctataaacctaggaagctatagctcaggatgccaggcaattaatgccaattagtatttattcatcagcctattgcaggcagacaaagtttgctaacttcttttctgctctcccggatccctcaactccttcctctctcaagttaattcaggtttgaagcgagacacaaagggtttgattagccagctgaaaggggaagtcccttccagtaaactgtccccaatttgtcggcactcaccactttatcggggtgcatcacgtcaaatcaaaaacgtgatgagaaactaacagcagtgcagaaaagcagtaaatactgaccaagtcccggggccagagcggccgccgtggcagggtccagctggaatggattgagcatcagctgtgggtcgccagggttctccaacttcatccccgtcaggcctatgttctgggccaggtagtactggtacagctcggcctcagcaggggcgaggcccaggtgcaggttatgctggatctgcttcatgttctgttgcagaagcatcatattgtgcatgtgcttctcgctggtcatgtgaatccgcaggttccgcgccacgttggtctcgtaatcacacacctcgcagcgccacgtgggtttctgcttaggtttggatggagagggggtcccgcagccaccgaggctgctgttgggggctggggccgagtggccaaacacctgctccccggtgccgttttggagattctgcacgttgttcaggtgcttgtccgactgcatatgaatactgaggttgcctttggtcgtggtagagtagttacaaacctcacaacggaagggtttatagccacatgtgtagctctcaccccgggcgagcctagggtgaggctgtccagtcttacaataaacacaggagcctcccggctcggggtgtttctccttcatgtgggcttccagggtctgctgatacttgtagtgccagttacatttgggacacttgagggttttgcatgagttccttgagtgcatcatagtcatgtgacccccaagagaccgcgaggaccccaaaaccgtgtcgcacttgggacactcgatgccactgcctggtgagccatctcccccgggcccgggagtacccggggcactcggggtgaagccatgctggtgaggtgcagccgagccgtcttcatccccccgggctgtctcgctcaggtgagtggccgtggcaccctctttacttgcgctggcttctgccaagtccttgccactgatcccatagctgcctgacacacccccaccagccctgacggcggcagcctgttttttcttttctgggtcatcagagacagtggccgaggaggacgaggggcccttttcaatgaattttagcacactggatgataaaggagaaatgctttggtttaaatgagggaaatctttgttaccgatactgtcggtgagttcccctaatacttcctcgtcgtcaagttcattggagtatgcatcctcttcgtcctcatctcctgcctcggtgggttcgctcttgactgggcactccccgttggggtgtaaagcgttgctctcttttggcctttcacagttgttctcttggtctttgctctctgacatcttgctagactcagacgatgagtggctgagggagacggaggtaattggggtgttcactactaaactagacagcccccccagagtcacttcagcctttggcatttgggtgatccccagcggctgctcggcggagccgggggtactcgggctccccttcaagaaggcaaagccagccggcaaagagtcaccattttcaacatgaaaagcgctccataaaccgcggaaggttgggtcgggtcctatgaggtttgtagtagaaaaatggggataaacagaagtggatttttttggttccagaaagcttataagaggttctttgtctttgccaatcccctgtattatggccgagacgcatttgttactaaggagtttctgctcctcctcgttaagggtcatccgatggtcatgcacagcatgggttacaaatgacctgatataaccgaaagacaacttgcacaagaaacacattaaaacaggtttccttttcccatcgctaacacaaccatcgaatttggacaagtccacattattggggacatctttggacacacaggagtttttggctgagccatcactggttagatagtctttctctctcttgtgtcggagatcgtagacacggaaactgtgcaacacaggaccaactcctgctagtgctgaggtatttgggaaagcctgatcggctgtaaatggtttcccgagggatgaagcgatatgaaaagtgttgatgatctgtgggtagaacgacagaggcgcagaagcagactgatcacccttctctccggcagacgccagggagtccaggaacatcgctgtagagaagagtctgctgcttgccccactctgtgcattctgcccactttctttggagtcctcgatgatataagctgagccatcaggctggtaaacgatctcccctgtgagattttccacgtcactatcctccaactcgctgatctcgctctcgttgtcatccttcaggccgggaaggcgggcattcgggcagtggtgttccatgtatttctgtaaactgggaaaagaggtggcacattcgttgcacgggatctccttggctgagggaacctgagtggcagccgcattctcgacactgaaactcagcaagacttcactcttgcgctcatccgttttcaggttgtcatctgtggagctgtttgccctgtcgggctccattcctgcaactttctccggcacctcattatcgagttgtgccgttccacatagctttgatgtgctctgcccattttcctgccttgagataggaggggagtcacaggtttccatggcaattgctacatggggatctcatttcatccagcctgtcagggacctggataaaaaataaggtgagaggagccatttttattaaataatgacacagctcactaatagcccatcactaatttacagctgctgtaaacttgactatctaaaaaggtgagggggaaaacttaaaaccagtgtacctatctatcacagacagactttgtataaatgtagcaaaataatgtagatagctatcacagacatgcctagacatccggagtgtttttgaaatcactcttgagcattcatcacaaatctaaaattcgtatcagtaagctgtatacttttttcatccctgttttctgaaaatggatataatatatgtaaaagctttaaaaccccctttactctgatagaaatgtaaatggctttcatagacaacagcaggaataaaaagacaacacaaataacttgtaatttaaaatttaccttttactttatcaggcagtgagtagaag

SEQ ID NO: 222 - DNA, 37010 bp, Hippotragus leucophaeus
  source 1..37010: mol_type = genomic DNA
accaatccatacatttctgccagaagtcctactttaagctttatctgtaccaaagactgccacgtgtgttcttaaaatcaaccaccaagatacaaattaaattgcctgtgtgatgccatcaaacgggtgtgatgccagaaggaaaaaaaaacagaccaaccaggacgtttttttctgtcccttttagatcactggatgacaagtttacctgaaaaaactgatgtcaataaaagaatgcatcccctgtcctgacacagtttatagcatttagctgcagaattcctcctggacttgagaaacccaggtagcacacttggtttttccaagaggtggaaccacacctgctctccgcccacctcccaccatctctgctaaagcatcaagggtgctaggagcggaaagtgtgggtacatccactcctgtatctacagggggcggagtcttgggttgggggcgtggccccgggcccggcctctcggcggcagttggctccgggggcggggtcgggcctaggcttcctgtctgcgcctgcggaatagctgtttgaccccggaagtgcctgcgctctgggagctgtcaccgtggaccgcggcggcggcggcggcggcggcggcggcggcggcacatcgctggcataggagccgccaaggtgagtgcgtggctgatccttgcggatgtggggcatcggacctgggaggggctgcagccgttcctcacgcggcctcgggcctcccgcctcgatggcagggccaaggcttaggctgccccaggggccatgaatcgccccgttcctcctatctctccaccccgacccggagtcaggccgccagaacttagtcttaggattcgaggatcggccccagaatgaccttggccttgggcgagacgctgccctcctaccctcacctcgagcttcagtttcctaggggttcattcattcgttcaacaaatgttatgtccagcgcctcctacatgggcacagatctagctaggtactggagatataaacagagcaacagaggaagttcctgccctcatagagcttacagtctagtgggcggggacagtcgacgacaaagaaatgcactaggtaattaaagatatgactgcaaccggaggagtgaatactttagatagggcaatctggtacgatctctgaggagggtaatattgaagcgagaccagaagggttaagtcagagaaactgagacaggagtagccttggggatgctcccaggccttcttgcacttactccaagctccccttcaaaagaaagccctttcctaaatttttaacttctgctgccctgcttgacactgaggatccactgtggggtggggcacagatatcgtcatgatcactgaccttgtcatttttagagtccagttattgcctagttaatttctactcatactgtagacgaaaactcaaatattccttgacatcctgtctctgtcgagtcagttctctttgttaaatgctgtcatagcctcatgggccttgcctgcaaagcatactcacagtattgaattttccttgttcatgtggctgtttggttcatatctgtcttgttaaccatcaagaccctaaactctgtgaagggcagaatctggtctgttatttgccagccttaggattctccaggcttcagtgcccggcacatagtaggtactcaaaaactatttgaagggacaagtaaggttattaacagtttttgctgtccagtagttcatagaaggtctctcccgccagcaggctgttaccttctctttctgattatgtctctcctctccttacatgactcctcgcttcgtcttcagatgaaaagccaaaatctttagcacagcatttgaggctccttttaaagtggctccatcttttctagccaacctcttctctccacttcttgtgttttcagccacaccaagtgtctcccttatccttcaaagccacaggctctgagtctttgctcatgcgtgctctttgcttagaatgttcttcctttccatctttttctcctgtccttcaacagccaggttgtaggtcacctttcctgtgacattcttcctttctgtgctgtgctcgtcttggaaatttccagttacagctctaacgacacggattaatagtcatttacgtgcctaggtcccaggagataattgagtaaggatttgctgagtaattgaggaagcccaaatgctcggcttatgattgggacttgaataataataacaagtgaactttaccgggggcttccttggtggctcagtggtaaagaacccgcctgcaggagacaggagacatggcttcgaaccctgggttgggaagatcccctgaagaaggaaatggcaacccgctccagtattcttgcctgggaaatcccacggacagaggagcctggcaggctacggtccatggggtcacaaaagagtcagacgtgacttagtgactaaacaacaaactttaccgactgcttattatgtgccaagtactatgctgaccgcttagtattgcttacttcttgtgtcaaccctgagggattatgagattatgtactgttctcatcccgattttacagatgaggagatcggagcgtaaagaagttaaggaactgctcaggtctcaacatgggtaggatggagccaagacttgaacccaggctgtggaactataaacttctcttttgaccgtcataccagcctgagtctaaactgcccttacaggctctggcctgtaggaatagatttcttctaaaagcaggttgctgtccgttcctgtctagacctggactctgggaactagaatttacagtgtggaaagccgcctcctccttatgactctttacccatcctaggtccccacactggacactcctccagtctttggaaggtgagcatggaaaggactgggcccgggcttcatttcgacttctgcactggtgagctgagcactgatgtttccagctgtcctcccagcatctctcagggattaggaagggagtatttttagcatactcagcaccggagacgcaggtgccaaggcacaagagctgggcttcagtttcaacttggctactcaggtatttgcctgagcaaatcagggcccctctttggacatctgagcataataatccttgtcgctcttaactggactattgtgaaaggctagtaagacagtagctcaattagaaatcatgtattgactcaatggacatgagtttgagcaaactccgacagatagtgaaggacagggaagcctggtatgctgcagtcgatggggtcacaaagggtcagacacgactgagcaactgaacagcaacgacaaatatacagcagatggtgttatctacatttcgctgaggtgaaaggtgaaagctcagtcacagggaccatgtgtttgatccactgtccactgagatcctagtgctagaatgggtctcggggactaggcagattagactagggactagttccttctctttccaccccatgtgaagatgggtatcttcacagtctttacagtagcccctgaaccaaggttccttgtgcaccaagctgcttcccacctccttaccttcgttcctgctgtttcctccacctgggacacccttcttcccagtctccactatcaagactcaactcaagctctcctgagcctttaggcgctcctctagaaatgctctccctacagccacaagcccctgcccccagctcaactgccctagactcagcacagcaaatggttaagagccagtctgcttcatcagccactaactctgagacctaggggaaattttttttatcttctctgagcctctgcttcctcactggtaaagtgttagttgcttaatcacttctgactctttgcaatcccatggagtgtaacccaccaggctcctctgtccatgggattctccaggtaagactactggagtgggttgccactcctttctccaggggatcttctcaatccagggactgaaccagggtctcctgcactgcaggcagattctttaccgtctgagccattagggaagctcattggtaaaatgaaggtaatgagattaatagcaccaaccctggacttgttacaagcattcatacatgtgaagccagttagggtgtctacaagcgagtgcatgctgagaaagtggcccagaagagcagcagcacccgagaggcatgtttctgctgctattattgtcatcattattactgcatcggagctcccacagagcagagaccaggccttatcagtctgtcttggtaacactagggcctggcctggtatctgagaaccaggaccgcagtgtctcatggctggccatgtccctcagcacctcagggagggctcaggaggtgatggtttcctcatcctacccttcatacatcttcatgttgtcattgagatgtgccagccttttgtggcatgtcttcttaagagcccagagtcacttctgttccatgattcagccaatatgcacatccctcctgtggatcaggccaagtggcattaagaaatgagtgttggactggaagacaggagacgtggggtctgcccctcactgactctgcggcctgtttgggcctctctaagagaggaggtcactctggcaggtttccgtgaattctctgtgaaaaccttctggcccttctgtttatccatatccttcttccctgaagcctagaaagtttgtaaaatcttaacaccctctacaagggaggaaagtcccatggcttcaacccgcccccccccccccaaatctggttaaaatggtaagaaaagtgtcatcatattcagctgttcatcaactatttcatgaagccacctctggaccaggcctgtgctggtcacagcaaaggtagcaagagaaggagaacccaggcacaggctccccagagctcacaggccaaggagggcatggagctggggccatgagaaagataatctagttacttttaaccagtacttcacgacttgggtgggaattggagaaggaactgcagcccactccagtattctcacctggagaatcctatagcagaggagcgcggtaggctacagtccccggggtcacaagcgtgggacgtgacttcgtgaccagaccaccaccgtatcaggtgtcacctggggagtgtttccctcctcagctgggaactgccactttaggcaaaaaagtcactggtctaggtgagtagttgtgggaaccaggcctttgaggcccaccaggagccccctgaggccggaggttgaagcttgtctcctggctctggggtgagccccagagcaggcccctgcccccggagcctctgcatctgttctcttcctcccatccgtattcctttcaggagggccacgcagcacaatgcccgccttgcccctggaccaactccagattacccacgaggacctgaagacaggaaagctgaggacttcgcctgcactggtgagccagtgccttgaggctgttcagcccgatattgatattattgaacttgcaatctcagaagcaaaaaagtaaattccttctttatcagttctatggtcctacaaatgacctgagggccacagtctacgtttcaggagccaggatgctgttaggtctttccagccccagtgcaggagttttctttcccagcagtagcttgagtttgagtggtattttccatgtcaccaccccataccttccctgcaaagcatttcattttgaatcaaagtctgatggcagttctgactcagcccgagctggccgggtcacggggctggcccaaggctgctggggattggaccctgcaggaggcactcagatttcagatgggcgtttttcagagctgtcccagctgcggtctacttggcggtggggggcggaggagggggacactaataatgtcagaggtcaggtctgaatgggctacgaagcactacgtgcagacgcagcagggctggggagactgagaacggaagtgagcatgccgacgaccggctgtgggggagatcagagccgtggagaggagccaggctgctggaggagacagacgcggggacccgagaccccatacccccttgctgtttccccaggaacattattagcttacttgaacaaggtgggaggaagtattttctgagtgcttgagtaaagtcgtgggaaacaagagcttggtgttttatttcctgctttctggatggcttcctattgcttcctgactactctctaataatagtgcttaatatttatagagcacttgctctgggccaaagctttcacctggattatctcatggaagccaaaccacagccctctgagtaggcattttggtcgcccccattttacagatgaggacactcaagacctcaaggtcacaaaactagaacactaggggagtcagaacaggaccccagctgagctgtccctggagtctgtactttcttcaccttcctactgtacagcctcttgtttctttttcgtaactttttttaaaaatcgaggtagtgttggtatccaatgttgtgtgtttcaggtgtatgacatagtgattcacaaccataaaggttatattccacttataattattataaaatgttagccatgttccctgaatatatcctcatattcatagctcttttaggtaaagaggatattgattagaaaatcaggaactgttctgtacagtatgttagccattcaccacatgtggctgtggcgctcttgaaattgggggtgattcacccaagggactgtatttttaatttagttttagttagtttaagttaaaatagtcccatgtggtgagaatctgctgtcttggccagcacgggacaggtctggagcggttccgtctctgccgaggttctgttggacagtgccggtggagactggttccttgggcccttccccatgtcctggacaccaggctgttagactgcgggccctctgggagcagggactggtcccttcccttactctggttttccagtgccaggtgcatcataggttctcaggagacatccagtaaatgagttaaggactcttgccgcgctttgggacagggcctggagctacagagtgaagagactgccctggtggggcccacagacggagaggaagcagactggtgggttctctgcagcatgcatgatcaggatgtgatggaaggaactccacgctgctgatcgagaccagggaggggcgcatggaggtcttgggtggtgggagagctcacgccaccagggacgccctgctgtaggagggagatcctgaactgcatgtggaagggtgtataagcaccagccgggcagagcaatggagaagggcgggcctggcaggaggacctgggtatattgtccccgagtcctgagagcctggttcctacaccagcctcctggagtggaagcggtattgcagagttaaggagcccagccttgtaaagaaatcaagtttggcacccaagtggttgaatgggctcttgagaaagataaggatcatttaaggggagcatttggagaacagtacagaatagtttcttatcaagatgaacagggcacaagtttgatgggcagggcatgttcaggaagcttcatggggcaagtgggacctaggccaggcctgaagagtgggagatacagcgagagactgcagctcctctccctgggatcctccatggcccctgctcttgggcgtggcgtcggaggtgtttcaaagaccttggcaggacctggtccttcattacctctgtgcattcctctgatcaacctgcaagtgtgtatggagggagtgctcaatgccagcccggctccaggggctgggactgctgtgtgagcaagactcagaccccctccagagacctgcagggtagtggggaagacagaaggcaggccctccctttcaataactttattgaggtgtcactggaggacaataaactgcatatatttatggtacacggtttggttggttttgacatctgtaaacccacatgaaaccgttaccataagcaagataatgaacatttctgccactcccagaagtgtcctggtgcccccccaccccctattatagtctaccacttcctctgtccccatccaccgcaaccaaagatctgcaggcacttctgatgcaggtcagcaagtgctgcagtcagggaagcatagaatgcaggtgttgagggagccagggtggacccctcacctaactgggagacttcctgaaggaagtgaggtcagagctggggtcagaagggcgagcagtgagaccagggtggcctgcggcaccataggtcacttagcaggtgcacagtgtcagctttggctcagatcctgcctcagttgcttccttagccctgtgaccttagctgagttcctaaatctcaccaagtcttggttttcttctctgtacaatggggagagtactctttccctctgagacagttgtgagttaaaaagaaatggactgtgggactggcctgctcagcagcccgcacagggcagtcctcagtgagtgatggcttttttctatcctttcagcatctctccctccaactccacctcccactgcccagtgcaatctgtgcccccgtcccctgtttttttttttttttttaatggcccgtctttatgcctccataaatggactctgtcttccatctacaaattctgcttcacctccaaggtccagttctggatgctgcctggcctgggaagcggcccctcgccccccaggcgctcccacagtgcccctgccaggtttgagctgtctgcgttgtgctcgtctgatgacttagccgtgcatcgtcccctctgcagagtgggctctgggagcacgccgactcccttctcgtgtgtgcccccacacctggcagagcagggtgccagtagatgttcgaaggatgggttgcaggaaggtccagtctcaggggcatgcacatgtgtgtgtcatttgggcaaggggggtcggtgagcagcctggcctgagaagtgacctaagtgagaggtgaggcatccaccggtagaggaggggaacttggaaaccacagagaagaacttaggcccttgagagtagttttgagcttgtttcaatcagcaggattccttttgtataaattgtgatttaaatgggcgggggcccctgtggaggccctcaaccccccaaggagccctgtggaactcgaaatcttggcagtttgcgttcgggaggcttaggtggttctcgaagaaactgacccgtcagccgtgacttccctgtcccccctggactgacaggcctggaagtgggtggactgtggttgacaacagctgagacgaaaacaggtggcctccttcctgtcaccacctcccccgcagaaagtcagaggggagaaccgagctcatcttttctttatgtgaacaaagtaaggtttgttcccggcaaggtaagggttagaagagagcacttgtgaggctaagccgagacctgcaattacttgattagcatctttaccaaaaaattactgaggtttttctctgattatacaaagggaacagcgcagtgatatgtacagtacgacattgtttgtgtcagaaagatgaaaatgggcccaaacaaatgcctcgtgtggctacattttaatgtaaatgcctagaaaagggcagtgaggatgctcacgggatggggaggggctccctctgggtggatgctagacccccccccgccccgccccgtggtggtcccaggggacttatctttctgtactgttgtgagtttttgaaaaaaaaaaaagaaccctcctgcctcacttgtgtaattaaaaaaaataatacatgttcttttttaaattggaaaatatagtcgagtcctaatcctttctattagagatagcaactgttagctttcaggtgtcccccaacccccggcccgacactcttttaaaaaataaagtccatagcagtgtgtgaatgtgttaaatatggcaccttttttaaaatcccaaaaacggtcatacaaaatagaggagtttgtgtcttgctttttcttcccttaacctctccctgtgtcattaaacattctccagaaaacatggtatttaatgctctcctggcgctcccagactgcggccaagcctccctctgtcagacactcggttctttatgcctgagggtcaccggttggaagagcccagggttgttgctgtgggttggcagaggggccctcgctgactaacctctgccacgttaacacgtggtttttggatccgtagcaccccgagcagaaggcagaccggtattttgtgttatacaaaccgccccctaaagacaacattcccgccctagtggaggagtacctggaacgcgccaccttcgtagccaatgacctggactggctcctggccctgccgcacgataaattctggtgccaggtaacattctaccaccattcccgctaagaccaggcacgtgccatgccgttggttggatgctgttgtttttctccccaggaggtgctttttcttcctctgcttcttacactggatccctaagagcaaattgtggttggaattactgtgttctgttatcagcatcttaactatgtttacacaaacgccttccgccatggcatttttagaaactcctgtttagctcacttatgcctcttcggtcccttggggttggtgggcgtgtttgccccaggccagagctgaccgccagtgaggcctgcaccggcccccccacaggccctcgggcctcagtggcgcagcctggctgttcctgtcgcctggcctaggtcatcttcgacgagaccctgcagaagtgcctggactcctacctgcgccatgtgccccggaagttcgacgagtgggtggccccggcccccgaggtcgttgacgtgcagaggcgcctccaccgcagcgtttttctcaccttcctccgtatgtccacgcacaaggaatccaaagtgagccccgggtcctgtgataggtcgcccccgccagctgacgcccctgggaatgcaggctctggaagtatcgagtttcccccttgtctcccgctttcactcctgccactggggaagaagtctgtgccacctcccccatcctttgagccgccaggtcgcctgcgttacacccagtatttccatcagtggggagctgagggccctgtgccaggggacacgtgactctgcctttccttgcgcgtcagagggcgaagcatcgattctgattttttttagaggaccctggatgtgctgtctaaaagcctttactcccccaccccgggtttatttttgttcatttatttatttggccaaatcgtgtggcatgtgcaatcaggctgttccccgaccagggactgaaactgtgctccctgcagtgggagcgtggagtcctagccactgactggactgccagggaagtcctgccaccccattttaaaaataataacactgcccttaaacaaacgtaacaaaaatattttgcagacaatgagagtcgcccacaaaatttccttccctcaaaataaccactgttaagaggcctgttcttcagggaacttttttccttccaatgtgtttgtgtctgtgtgtgtggtgcccacatatttactttaaaaatagtatcttttctgtttttttagcttgttagcatggaaactgttaaatatacacagaagtatcacggctcccacgagcccattacctggcttcaacagttagcatcttgcctatcttgctttccctcccccactgagtcttctgtttttcgtggagtattttatttttgtccttttgaagctgtgccgtgtggcatgcaggatcttagttccctgaccagggatggaacctgagccccgctccattgggagcgcagagtttcaacctctggactaccagggaagtccagtcttgtattttaaagcagtcccagtcatcatggtagtttacctgtaaataactttagaatgaatccccggctgatggtttcatagggagcgtctgcttccttttacgttagggtgagtgactgtcgctccaggtcagtccccttggcttgggcgcatccttggtgtggacggagctgcttctattagccaggcccccccgatggacctgaaggttatttcctgtgagcctgctgttaccctgccacgcacgtgtttggggaggtcgctcatcctctctttgctgttccttaggatcactttatttcgccctctgctttcggagaaatcctctacaacaacttcctgtttgacatcccaaagatcctggacctctgcgtgctttttggaaaaggcaactctgcactgctgcaaaagatgataggtgagtaggatgtggggcccagggcctggggtggggcatgggtggtgcagaggtgacccccacgtgtccacaggggcatcagggcagtagcagtgggcggtgcttggaagtggcctagcggatgtgtgtgtcagctccgaaaggagtgactcagtggctgtgggggaggggcgacagacaagggcagacgagagctcctccaggatctcggagccccagcgtcaggctgggtgtcctggcccaaggaggggggcatttgcttccgcggtgacagctaaccgtttgcctgagtgtgcactggtgactctgccgatgccccacctgtgtcatctcgggcgatcctcatagccgccctgtgacgtcagcggtgtcaccacccccatttacggttaaggaaactgaggttgaatgttcgggacttgcctgcagggtcgtgactgatgagtggccaagctggggttgatgtcacgtgggcatgaggctcacactctgggcctcggtcactccctgcctcacgggtgacatggccgcctcagaaatgttgagctttgagttgcttctgaaaatggacaggggcaggggtcagaggggaccccctggggttgtggagggaacggacatcagcagttggagcctgtcgggaggcgggggtgctggaaagttcacgcagaagctttgttgggaagcgccagaggggacagtggcgtttgccttagaagaggagattgtggcaactggcccagctggtcaccctggacactccgtcagccctcctcaccctgagactgtaggagagggtcttcctaatgccaagttacagagctcggtcaccccttgaaatggtttccttcctccctttcccctccaaccccagtgataaaggtaatataggttaatttagaaaattttggaagagtataaagaaggaggaaagtaatgatcaaattcctgccccccaccccccacccccagagatgatcatttggtgattattcccttctagtcttttctctgtattttttaaaactgtatttagggcctaatgcatatgaaatttcacatccagctttttcactggcacaacctccggtttctcattcaggtctaatcattggcctgatcatcagttaagggaaaagacccttaataattatactatagaacgagaggatggggtgagtacacagaagcagcatggttagttagagaaataattatcaggccagtctagttggagcagggccttctgggagggagcgtgggggcaggggaagaagctggcatcagatggtgggggggtgtggggagggctctgagccagggacctggggaggggtacattgctcggtagctaaaagggaaggccctggagtcaaaccgcccggtccacagctgtattctgggctgtgtccctctgactcgggcagttagctgctctaagcctgagtcttctcatctgaagaaagggaagactgatgatccatccagcctgtaggatggttgtgggttgtaaatatgaggtagggcgcagcacagagccttgcaagttacagacactcagtaagtgtgagctcgtattgtgacgaggccgtgggagcctctgggagcacggagcagggcggggagccatccaccgacccggtcaatctggcagcatgcaggtggggagggtggtgataggaggccgtggaggaggccgggctttggcgtgggctggaagggaagagcctgggtggaaaaggacatccgagaggagagttgacggggcttcgtgaggttggctggagggagtgaactggggttgggaagcaggaggcagtgggggtgtgtgctatgagtagagacaaggtcagcgttgggtctggaggccatcaaccgctccgaggatacaggagaagaggccgtctagccacagacgggtgaggctggagcgagagagctccgcctgctgccggggttccaaatcattcagatcactggactcctctgagaattggacgaaagcttgtctccaggaagacatagcccctcatagattttgagctgtttaagaacgttctcatccccagattaagaatctgaaatcggtttacgaagggaagcactgtctttggctcacggaggctggttcacagacaagatggcaggatcaggcatcaggcgccccttcttattgcgtgcatgtctgtctgtctgtcagtctgcaggccccttctccacaccctccaacacatgcattagctctcttcccaaacccctgagcagaagacaggagacacagcatggggcagcctctgctttctctgccccagaagctcttgagcaaggcagatcagctggaagagggttgacaaaggagacagggggtgggggtggggggtggagcataggaactggccgactgtccttcgggcagaagcccagaccttgccctgtccccaccccccactttttttttaacctcaaggctggtgttgtgaatcagtgagtgtaattgtgaaagctgggcctttcagttagtctgtgagaccttgaccccacggaggacagccctggtctccttggccatacctcgcattcaccctgggtttctgaactgcttcagtctgaggacgggtgccatcgctttggctttctaattatttctttaggagatcaaaagtcagatcttccctgtcattgggatcagataaaggaaaagaaagagactccaaagagcccaagggtagactgtgaaatgtgatctattttgaccctcatagagcatccctgttactcaggcctgagcgtggggaggatcctgagagagtgccttcccccttacctggcactccgggtgtggtgggcaccgccttgtggcctggggattgtgggaggaggcctgctcccgacaactgggtcgggagactctgactgcagagggtgacacctgccttctggtggactcggcgctgggaggtcactgcaggcagaagggaagggcagtttcattctgtgaggctgaggatggtgtgagggaagaatgcaattctagggatgggagagggtggtgggagatgccaggagaagccagatcttgcaggccctttgtgccacggtcaggagttctaacttgaccttgagggtgttgctaggagaattcaatgaggaagagcagaggaagactgctcggtcactcactccccactcgtcaggagcaggaggtgggcacagatgatcagggaaaacttccttcacaggctgaggggtcagcacccatctggagtgggagatgccaagcaagctcctgccagtaacactttctggaatcccaggaccaagtggcctccagaaaagcatttagagaaagtccagccccctaatgactcgcttatacacccagccccatctggcctctgatctcattcattttcaagccctccgggatggggtgagggctgcagggttatgttgaaggcagccaaggacaaccctgcccaaggacggaggacacctaggactcagagcgtcctgacagccagccagccttcagtgccaggatcacagtgggatgaggaagccaggccccttttcgaggcggtgccattttgcacggtcctgcccctcaagagctgtgatcctctccccctccgcgttgggcagccggaacacttggtttctgtcccagtgaccgtgtactctaaccaccactctcacagcagcagtaaacactcggggcttccctgggggctcaatggtaaaatccagctgcaacgcaggagacaggagttcgatccctggggcaggaagatcccctggagaagggaatggcaacccactccagtattcttgcctaggaaatcccatggacagaggagcctggagggctacagtccatgggattgcagagagttgggcatgactgagcgactcaacagcaacacacacttgggaaggggcttcattttctgggaataactgcacatgtgtggtaaacctccccccaggtctttggccagcctctcaccttggagaggggctgtgtacggctagcaggttcaatagtagagggtgagagaatttctagagaatttctccagaattggccttgcaggacccctggactgtagcacccaggtttcttgggcaaagagatcacgtctcctaattttcctggatgactcactcccatttacaaagccaacactgtcatccaaggcacagtgcccaagtgtgatcattccccggggacggcagggtgagctggtttgaccagggcgggtgggtcttttatataattcgctggggcagaggtgcttaaaaggttaaattgtactgaggcgaggcccctccctcaccctggggaagtttctaggctgggccagacctctgtgccagcagggcccagggccaggactgctctggtgcaggcaagctcaggagaggagcgaaaggtcacagaacatgctggcagccatgtggaacttgtcttccattctgtccacccccaccatctttccccaattcctacctttctcttctcttttcagggaacatctttatccagcagccaagttactacaatgacctggacgaaaccatgcccaccatccttcaggtaccagctcttcgccctgccctggggagggtggggggcatgggggcagggcaggcccattctgctacctggagatgttgctcttctttcctgcaagagtctgggagaactctcttcacttcttcacaccagacgcacctccagaccatgtgttctacccctcacttcattccttcaaatttgtcccttcccctctcgaacaggactgacatctaagggccgtccagcactcatacggagggagcttggggtgcactctgtgttgtccgtcaacagccatctgcccctgaggatacccctgtacatttctcaagtctgagctctaaagcctcatagaatcatttttatgaaataatgctcattgtagaaactttggaaaattccaaaaaaataaataataataagaataagattaatcttcctccgtaatcccgccaccaggagataagcactgttcacggtacctcctagaattttgctgctagtgtacttaaatgtggtgctcggttgctaagtcatgtctgactctttgcaacaccatggactgtagcccaccaggctcagactctgtccatgggatttcctaggcaagaatactggagtgggttgccatttccttctccaacttaaatgtggtgcgatccacaacgagctctgttttccccctcactattgatttgtcttttattcaatacagttcctataaattgccttgccctgggcatccagaaatacatgttgctgactgtctctcttaaatatccatccccatacacttgtctagccgatccgggttacatccacagggtttacgtacatttcgtcatcatcatcatcctcaccacagtcccacgggaaggatgtccccatgattcccttttgacacaggttccattctgagatggtcactgagctcactgtctcacctggtgtcccagggacaccggcatatatcctgaagattccaaggcagtgttggggtcaccagtccctcactgcaggacgggggtccccgctgccagttcaataggaagtgagagagtcacctcttgcgttcacaggtcttcagcaatatcctgcagcactgcggtctgcgcggggatggggccagcgccacaccccagaagctcgaggagaggggccggctcagccccagcgacatgcctctcccggtgagcttgcccttcagccggcttctttctggccaagagaaggcctggagcctccccactgctcacagcccctcaccccaccccgcaggcggcttggcccatcacacacgctttcggacatttcagcaggttttctcgcttcatttatggagttgcggagggaacagcatggaggtttagccttcgcttagttcagctagacaggttcctgggtgcgtttctcatggggccattcatccatggcaccagcatgccccagcacatgccaggcccccaggctgggccacgaggccccagtggttacagaagcagatgcctgtgttagcacgggagttagagcagggacgagggtgcgatgggctgccctcctgcagcttgtgctatcgtgggaaagcaggccttaaacaagcaagcgttccagaaaagggcacagcgagtgccgtgggaacagggcacctcgccctgtgacctgcagataagttcccttatctgtaaagtggagctctgacctgtggcccagcctcttgtttgagttgttcggagaatcagggagccctgcctgttctcaacatgctctccagacccgatggcgagtgggggctgggtgtcttggcctccctgggctgtaatttctgtgtgggacctccggcgctgtcttcagattcagggatgggttctccttcagcttcaaagagagaatcgtattaacctgaggcgaaaggtcacccttgacgcccctgggcacgcatcctttggagctgcggcaggcggacccgagggggaccctgggctctgtccgctttgcctcagaccctcggcagggcggtccctggggggactaatgcggtgtttttcctccggcctgacaggagttaaaggatgtcgtcctctacctttgtgacacctgcactaccctctgggcctttctggacatcttccctctggcttgtccgaccttccagaaacacgacttctgttacaggtacagcggttgcagttgaggtttgggttcacatccacgttcagccaatatttactggacgcttagaacctgctaggccccctcttccagcgcccgcctgcgtggaggctgcatttgagaaggacttttactggggggttagcagaggaggagagggagaaaaacgccagccaagggcggggcagtttccattcagacccggtctgctgcagagccctcggcacgggtgggcacaggagtgcgagaggctgaggaggctcaggctgaggacttcggcctccagcgcggggaggcgcgcgcgcaagcagacgtgcgtccacgtggggccagctggtggggctgcagcaggaatgcagacgagggagcacagccgtctggaggaataagagacggtttcagagtgatgcttagatgagaccttaagaatgaacagcaacctgcctggcagagaaagcctgcagtggcccagatggtggagaaagccgtgcagtgcagtatgacgcggggtgtgagtcggggagtgggcttggggagcaggcgaccacaagatgcggccccagggaagtcagacctgctgtgtgatgtgtgttggcagggagtggggactttactgtggaggcaggagggagccctggaggcttctatccaaagaagtcatagaaagatcctgctgtgatggagaaagaccaggaggggatacagtggagggagaaagaccctctttgcccacttagccccatgggcatccgttccttgagcagtgagaaaggggtgccgggacgggggctggtaactggctcgttgcccggcaactgtggggggtggggggctatcctgctgtcagtggcctcgggctgttcttgccaggcatctcccccagccattctgggagctatccaactccatccccccagccctctgtccactgggtcatttgcccagctattccacaaaacatttatctagtgcagacatgtgccagagatggcagctgctgccctgagcccaccgggtcccctgagctcagcctcccagagaatgttagaaaaaagtgccaatccacactgtccccagaagaaaagggtggggataggacttttaaaaatgttgtcacagttttttaaaaggtatttacctcatggcaaatgtggcaaactggaaacctgggaactccccagaggtaggaaatgaaatcactccgaacaatcaggctgttcttagacttattttcattcaccgtgagcactttcccattttgcgaaagcatcttcccaaatggggcaccgatggccttggaaagggtctctggagatgggagggtccttgccggaagagctgagtttccccaagaggtacctggaagacatcacaatggacatgagtttgagtaaactccaggtgagggacaggggagcctggcgtgctacagtccatggggtcacaaacagtcagactcgactcggggactgaacaacaacccccccacccccccccacccccccggaggcagggctgcagctccacccacctcagggtgaggaggaagaaaggaaaacacttttgactgggagtgaccctgcctttggcaagagatgctgcctcagacccacaaatagcctgaggctggctcggcctgttccaactgtgctggaggccaggaaggcatgctgagcagagtccttagtcccctccagggctccaggcaaggggttacctcaccaaacagcctccagctaatctctctgagcagccttctctgccttcctctctttctgtcctttaattttatgaacaaataatatattcacagggtgtataaaacacacctttgaaaagtctccctcccctccttctctacttctgttcctcacacacaaccattgggttagtttttttgtggaattttccaaagatatgcatgtaaatatgcacatatacgcaaataaacacattatctacctccaccctctttttaatatttcatatactggcatattgggcatcccacgtgactcagtggtaaagaatccacctgccagtgcaggagactcaggagatagaggctaaatccctgggtcaggaagatcccctggaggaggaaatggcaatccactccagcgtcttgcctgaaaaatcccatggacagaggagcctggcaagctacagttcctgcgattgcaaagagctggacatgactgagcacgcacacatcctggtatattatgagtgctatatgtactgtaggctttctgcttttaaatttaatgcgtatctgtgcatggaccaccttcagtctttggtatctctgagtagaactccactgtgggggaccccagaccccagagatggcactttaggttttttccaactgtttgctattaccaaaaaaaaacccaccaaaatacattgccacagaggctaactttgcacctaggtcactgtgtacctttacaactatatctgaggaataaattcctagaagtagaattgcaggaacagatggcacatgcatttgaaattttcacggatttcgccaaatcaccctccataggggctgtttcagtttaccctttcaccagcattgtgtcatggcaacgcctgactctgtttgagccaaactgtcctctctgtcttctgggtgccacgctgtgggcctcaaaagccccgccccttttggcctgcctacccacgtctaccaacagccccacaccaggaaaaagtggccaggagccagcgatcgacagacgaatgtttacagggcacattacatttgctgctgcagattcagctcagtcctaggaaatcagctgcttttctggctttgggaacttaagatgttcagagatagaattacaccccggaagagagatagctgcattttaaggtgtaagatcagcatcttctgagcgctgtgtgtctggttccagagaggaatagtcacgggggtgagcttatggtcaggaaacatgtgtctaggatggagagttgggttttgtgtttttttttttattggagtatagttgatttacagtgttctgttagtttcaagtgtccagcaaagtgaatgagatatatatatatatacacacatatacatacatatatagacacacatatatatacatgtatacatacacatatatacacacatatacacacatatacacacacacatatacacatatataggcttccctggtggctcagtgggggagaatctgcctgccaatgcaggagacgcaagtggttgggaagattccctggagaaggaaattgcaacccactccagtattcttgcctggaaaatcccatggacagaggagcctggcaggcaatgggccatggggtcgcaaagagtcagacaacttagcaactaaacaacaacaacaaaatatgtgtgttccgctctttttcagattcttttctcatataggttgttacagaacattgggtagagctccctgtgtggtacagtaggtcattattagtcacccctttcacgtgtactggtatgtctacgttaatctcaatctcctaatttaggggatggagagtttaagtctgagttgaggacaggtggctgtgaggttactgaggtgagaagccagctgggctggcctgtaccaggtatagatgtatcagagagaggagttccactctgatatcataggagatagggagctgctggcagtttctgagcaagaagaaagtcaccttgtacctattcctcaaagcttggtgcatcctgggtggcccgctcattgctctgtgagaatgagcccctctggatcttggactcccatctgagcaggggccgagctccaggtcactgcccaccaggctcttcctaggaccagccacagcggagcaatctgggctgagggagaaacttgtcttggggacaacctggcaggaagaaatgggccctcctgctcccttgtgcgtgctttgatttttctaaggaagtgtgagatttctgagctaatccagccttttaccctgtgtgtgtcattgcaggctagcttccttttacgaaatagccattcccgaactggagtctgcaattaagaagaggaggcttgaagacagcaagtgaggcggggacaaaactgcggcctgttgtgggagggccccagctcacccgtcctgggcttcgccgcccccttctctgtgtcgagggccaaggaccagggacgagaggccccgcagtttcagctagtgctgccctccctacctagcagcctcctggcagcagggaagcctttccccctcagctgttgctccagactcttccgctggttcctgagccaccatttgaactgacaggtggccctggaaccagccagcctctcagagcctgtcgccctttgccagctgctgtcagcggtgacctgaggctttctcagcccccgggggatggagggcggggtgggggccacctgcaaaggctgtgaggaagctcccctggcgcctttctgcctctcagatctacttttctttctctctggcctccaaggctgctaggtgacctgtggcagaggctctcccattccaagaaaaagctgctggagattctccacatcctcctgaatcagacctgcctcctcccggtcctggaaagcaggtgggcgttcgggatcccctgcccgcccaggcgggagagccccctccccaagcccggctggggcgctgccgtcattgcacggggctccctcccctgccccggggttgcccagcaaagatgggaaaccgggaagaatgcctctttcctccgactggcagagggaggctgcagaggggtggggcgggtggggaaggagccaagcctgtctgcagggagtgagctcatcctcttctctgtgtcctgttccagctgcgacaacattcagggcttcatcgaagacttccttcagatcttcagctccttgctgcaggagaagaggtgagctgggagtagcagcaggagggggcccagtcctcccaccagccccaggagaggccttccgtaatagagaccctgccctgcgctcaccatgatctaagctttcggtgtttgtggctgggcagcagacggggagtggcaaaccagcctggtgtccccgccaccctctaagtcccggccccacccaccaaccctctgactcccgcccccctccaggttcctgcgggactacgatgcgctcttccccgtggccgatgacgtcagccttctgcagcaggcctcctccgccctgtatccttccaccgcagcccccggggtgggcctggccctgcgtcctgggtcctgggtcctgggccctgaccggattggacccagaggagtggaggaaccgtttagccccagaacacgtgggagccagctttccctgacaccctgttttgggaggagaagactgctctgatcctcggggtacacatagccctcctttccctggtctttgctgagcgtctggggctgtgtgaccaagagggactcagccctgccctcggggacctcacgcaggatgggagagggataagcaaacaggcagcgagagtgtcactcagaggcaggagagtcgaggggaggagggggtgtcacacagaagcgaaacccaagctgagaatagcacaaggaacaggagatggccacaccctgaactaaatgttccccgggcacagtgttgagcccatagacgtgagcagcctgcagggcaccgaggggccggggtctggtgggggccgggtttggctgtggcagatgagccctggggtggcccttgctgaggaatttggggtgagcctgcaggtgctgggagacctggaaggatgtgaagcggaggtggaccttgtcagtctcagacttcgggtggtggccacttgggttggaagcagcatgagggagggacttgcctcgtggcccagtggttaagactccatggtcccaatgcagggggcccaggttcgatccctggtcagggagctagatcccacacactgtaactaaagatcaaagatcccgagtgttgcaactaagacctggtggagcctaagtaattaatttttttttttaagaaagtatagattgagagagtctagagcaactacccagcgtctgacttggcagcacccggggtactggagaggcacgagggcccgggaggaatgggcctgcaggccatttggatggcgggggtaggttgctcagtccagcctcagggacaccctgtgggccagctttgcagaaagcccacaacgggttggacaggatgcccggtggcagtgaccccaccgggccctcctcctgggggggtctttgtcccaggacccttggctgccagaccctggccctgcccttacgcagagctgctttctgctgagtggcaggtactgggttttgaggctcctgtggctgtgggctggcctgcttccccaggcagcccgcggtgcctgcagggtgcagcccagatggcccctggctcagccacgcagtgaagggtggagagagggctgtggtccctgagagagaccccttaacccgtcctcccagggatgagacacggaccacctacatcctccaggcagtggagagtgcctgggaaggggtagaccggaagaaagccaccggcgccagagactctgccacggccgagaaccctaacagagtcggggaggcggtggaggcgctcagcgggccatcctcactcccccaggaggaggaggtgtgtgacgggactggccggggcagcgggagacctcccttctgtgctcccgtgaggaaaagggtttgttttggggttgacagcttctgagctgctggcctgctccgcgctgcccttcgagggttctgagccgagggcgagctggaaggcctgtgaggtaggcaaggcgcttagccatcagggccttacttcccccgacaaggtgaagcacgggagctttttccacatgaactctccatcggtgcacacctctaaacagaggggaagccactgagcaggtgctgtcactccggacatcgccagaacccagcatcaccacctctgtgaccctcctgattggccgctgacccagggctctcccctgcatgtcgggaggcagcgtgacttggggattaagaccacacagctatggggtcaggctgctcaggggcgtatcctgattctgccacctgccagctctgagcccttaggcacatccctcacgtgagccctggttcctcccctggaggggggcgtggcagggtcctcgtctccacgtgggtgctcagagctgccgcgaggagtgagtgatcggcccctgggccccgctgccagacgccgctgtccttctgttaggccccaggccctgtgcccactgtcccagggccttggagaatggtggtcccctccccaccaccttttccccacttggcttcttgcctcagacacagaggagttttattactgtttttttgatttgtgaatttccttaattgaaaagctgaagaaaacgtattccgagccaaaggggcgcttctccacatcagccagctccagcgattacttttcccctccgatctcagtcgtcaggctgtcagagggggaaagggctggttcccagaagctgtggccacttgtggacagcctcgtccacgccaggctctgtgctctgcacttcttgtgtatcatctctttgaaccctttgaaaacaaccccatgaagtaggtgtagtctgggggctttataaggaggaaactgaggttcagagaggttaagtgccctgcccaaggtcacacagccagaagcagcagctcagctggtaagccgtagctccccctttcacagaggaggacatggaggctcagacagacttaagagacttggctaaggtcccttacccaggagggggagggctgggactcagaccaggtcgcctgactccgagaccagtgctgtttggggctccctggcccagcccaggcctcccctcggtctcttctgcagtgcctgggggcggctgcagccccaggccccgccgtgtgcggtgtggagctggactcactcatctcccaagtgaaggacctgctgccggacctcggcgagggcttcatcctggcctgcctggagcactacagctacgaccccgagcaggtgatcaacaacatcctggaagggcggctggcccccaccctcagccaactggaccgtggcctggacaggtgggagcattgggtgggaggaagctcgtggcgcccagactgccccggggtcctcgtcagggcccttcccatctcctctgaccccactcctctttctcttgtgtcccatcctcggtacttccccacagtggcgattcccaaccacagaagctgacgccctttttggggaaacagaaacctcaggcccccagaggtcctcgcatgccccctgcagcgcagagtgggcgccgctgggcctccctgctccgcctcctgggagatgggggcgcgggcggtgactgagggctcgcggccctctgtgctctgatgttgctgcctgcctggccactgagggagcacagccaagcttctcacttccttcatactcacccgtcttttcttttgttttttggggcttttttgaccacagtacacagcttgtaggatcttggttccctgaccagggattgaaccagggccctcggcagtgagagtgtggagtcctaacccttggactatcagggaattcccccacacctaccctttctgagttgggcccactgcttccctgcagcccctgggggcaacaggaaggagtgtaaacggatgtttcttccatgaataaatgtttgttgaatgaataagtgaataacttccagaaagaagctggctctgcctttgaaccaactcctcagcttccatgtgcccattttacaggtgaagggactgaggccaaaaaaacccagctcaaatgacctctgtcttgcagggaacacaacctgtatgagtggcacgtgtgcagggtggccacctcccaggctggggcaggcttgggcaggtttttagcctgtgtcccaggtgtggctgttactggggagtggaggctgtgacggaccgcacgtgggagggggagcatccccctgaaatggatttctgcgccacccccgcagacaggtgaagccggacccaacgcccctgctgacgtctcgtcacaacgtcttccagaatgacgagtttgacgtgttcagcagggactcggtggacctgagccgggtgcacaagggcaggaggtgagtccggtgggccgtggggtcccagagaccccaactctgcaagtgcagagaggacgagagaaacccagggctgtcatcttgatggaagtggtcacagagcttccacgtggggctcccccatagcccagatcagtgtgctccctgcagccaggctccgggcctctaacagcctggcttcaggctccaaccctgtgtgcagagttagtgagtcctccttgacagcaaaaggccagcagggccaaaccggcccctcttcccttctcccatcttcggaggagtccctgggtgggagagctggtcagtgctcctcagcagtgctccctgactggtgcctttccacccagggacacaatgggagaacgaaggcctctgcccaggtgaatatattacatttgaaggccttcctacttatttttggtctatgtccttcgtacttttttggcattgaaaagtccattcatgatttattcatttattcaacaaatatttgcctggtgcttctaggccctggatttatgagatgctagggacacggtggggggtggaacagacacggcccctgcccacgtggcgtttggactgatcagcttggcaaacaagccctgtgaactcacagatgaaacagattctccaaggcggaggtgcgcagactcccaagcctctacctggggcttcagtccaggcagaaaggcttctcggagacaatgctgtgggcagacggtggaaggatgaaggaggctcagttgtgcagagcaggcaggagctttccaggcagaccgaacagcaggggcggtggccccgaggccatggggagcatggcgagggtccccttcaccagtacagtgtacgttctggaaggatcccctggctttggattggggaccccttggagtgactgagagtcagcagccacacggcgtggtggcaggatcagatgctgacagcccggtgccagccccgcagtgttaatggagccatttcacggaatctacaaagctgggggctgctgggcaagtccagcgtgccttctccctcatcacatagatggaggcagcgaggggcagtgaggggagagggccctgcccgattcttgggacaggggccccagagctagaagcacaagctcttccctgctcccgggaccattcagcactggtggagtggccgtctgagggctcggggacctggcacagggcaactctaaagccatctggctggctgggcaggaagctattgcaaactgcttagtcatgcacgttgcaacatccccagatacgaggctggcgacgttgtcccgcctcagtgcccgcccttccaggccctgctgcaggagaggggcatgtggcgggggctgtcccactgctccaaggggcgcccggccaaccaggcagaaactgcgcagcagacattcactggcctcgtgctgggcagcccaggggttggggtttacagagatgcaggggctctgttcatatgcgcattatttatttatccactcagcaaatatttattaagcgattgactggccagatcctgtgctcgacacactgggagacacggggaacggggcacccaggcctctccctcccaaggcagacagagagacattgggaatgacttagaccgatcaagacgcgacagagtggagaggggcacggaggggcatggagggcctcagtggggttgcccgtcctgacgtgggcagggcggggcgcttagggcctgttacacacgagaaagcaagctgcacaaggcaggccacccttgagttaaaccatctgtgcgtcgttacagacactcgatccctaaatggtgcaagaaatgaggaactcttgtccccttgtgggccaggccagcacagggtagggcagttgaggcgtggttgacccgtggtgcagccacgtcttcaaggctgcatcttgctttctcgtggcccctgggtggccgcagcgtgatgtccagaaatgaccgggccaccaggaagtcagggtcaagtctttctggatctctcttagagaccaggagacctttcccagtggccccccacgtgaggcggtgagctggggagctgggctccagggctcctggagaaggggaaagaggaaggacctgtgcaaaacgaggggctgctaggagtgggggtgaggtgaggggcttgttaggtcggcgccaagcacacgtgctgcaggtgtatcgtagctagggaaggaggcggtgagggtaacgtggggtccccttactcctttcgacagtggtgccccggaagataaggcattctctttcagatcagttctgttgcctcaaaacgcttacgcaccctgtgtgcctcattggagagtcacagagcacattagcccattaaaggttctgacgagtcctctagtcagagactggattccctttgtgaagctcagcaggtgccaggtctgcttctgggcatcgtctgatttcatccttgcaccatccctggaggcaagatcaagtctcagcaaggataaggagccggcctgtgatcacacactcaggaagtagccgagcagcctggagtcaggaggcctgtgctctggccccggctatgctggtgggagctgtgtggccttgggagggttacgtagcctctctggctccccgattcctcacccggaaaaggagggctttactgcctctgcaggcctttcagaaattcaaaggagagtgtcaccctctaagggccaatttgagggccaatcttgaaggacaggctagagcaggtgaggagaaaggtggttgagcctcaggggagcccgcatgtacctggacttgagggaggcagaggaggcgccctgctccaaacaggctctggtgctctcgcagcttggctgacctggccctcgggtatgtctgctcctggctgcttttgcccctttctttctttctttccttctctggcttcatatgaggtcatggggccagagccttcctggacgaggtaccctgtccttacctgtgtcctctcctaggacccagctgaggcaggggcagtttgctagccttctctgtggtgctgccggggagccacataaccagaggccacgcagcatgaaagaacctccctctgcccacactggggaccgggtggaccaggggccgtgggatggggcagggagaatgtgtcagcgctcattcatcctaggtcccctggcccagcgtggggcctggcacctggcaggacctcaggaagcctgtgttgattgaatgggtgcgcttttaccaggggctccacctgaacgagcttggccccttcacttgctctctgcctgtctcctctccacccctcagcttggcagagagagcgcctgctaagggccgaggccacggtcacaggctccctctcctggcatgaggtgacagattactgtggcccgagatggttccctggtccagaccaaacatctccacatcacggagcttccaagagcccttctccagcgcctcccgcgacccccccactcagccctctgcacccctattcgtttctgctttccttgtgtttccaggacgtgtgtgccttcatctagcacacttctgctctttgccactagactgagttccatgagggcagatccagatcttactcttctgaatctctccccagcccagctcatagtaaccccttattaaaaactgttgaagggggtcttccctggtggtccagtggctaagactctgtgctcccaatgcaggggccctgggttcaatccctggtcagagaactagataccacatgttgcaactaagacccagcacaacgaaataaaaacaaaaaactaaaaaaaagttgaaggaagcagatcctaacccacggtgcggggggccccagttctgatctgccccaggctcccaggccagacacagcccgccagagtcaggcgcctggccctccccgcactaaaagcctgttactagaagatttttatggacgctgcgggctttgtgtctctgtttttccccctacccctgatacattccagaggcccgatttcacagctaagctggattttcttgcctggcacctcatattgattttcccctgcagggctagaaattacactccacaggcctgtgtgtctgacaagccaagctcttctgcagatttgcaaagccttgagtccagaggcccgagtcaccgccgctgtgctgcagctcactctgttcccaaacgtgtccctctccgcccctggctggcctcccctgtgtcaggatgggagttaaacttccagacttttcttgccgtgccatctgacatgggagattgaaccgcaggccagacagggtctctgggctgaaaagcaggggtgagagggaggggctggggtccccgagctgattacgaaagccacccgtgggctcactgtttctccaggtttttgttcctttgcaatgattccggtgaccccaggcccctcctcagagcaacccaggttgggggtggggccctaccagccctctgtctctgttcatgtgcatagataaggacatcttcacaggaagagaggacaggtctggtctgccctctgctttttacacagatgagatcacactgtgtttctctgcgcttgcttttctcccctggaggatgtcttagaattctgtctccatcagcacaaattgtcgctcttgagaactgccacccagcgtcatgtggcccctgtccttgggccatgatggacatgagttgctctcgtttttcactgttacacatagtgctgaaaagaaaatccccaatcagacctctctgcgcgggggccaacgtttctccggggtggaagcctcgaaggggagtctcccggctgaaagagggggacacgtgttacactctaatagctgctccttggggaggggggccctcggaagtggctggacctggtgagccccacgccccccgccggtgcttgatctcagtttgcggcggccagaggcgggagaagtgagcagtggtttgtctggaccctcgcgctgcggccccctcccgctgccctcgaagcctgatggttttctttcgtgtctccccgctgttccctctcgacgtcaggaaggaagagagcgcgcggagcctgctgaacgacaagcgggaggtgcaggcgcagcggcagcgctatgagcagtacagcgtggtggtggaggaggtgggcggggcgggctgcggagggggcggggcgggctgcggagggggcggggcgcggcggggcggaggggaggcgtccccgggcgccagccccgctgcggggggaggtgggccagcccgggccccgcggacccacgcttcggccgtcgcaggtgccgctgcagcccggggagggctcgccctaccgcggggacgattacgaggatgagtacgacgacacatacgatggcaaccaggtgggcgccaacgatgcggactcggatgatgagctcatcagccgcaggtgaggctgttgacttggggggtgtgggcggccctccctcagcctctggtttatacagatcttgtaagcaagtcagtgaccaaacgagggcctgaaccccagcctcccgactcctggtccaatgctccctccagccctagccagccccttggccggctggtccagcccaccctgagtgaggagccatcaactgggtctcatgcagttttccatttttcttcttaactgcagaaaactctccccagtgggatcttaggaaggttccccaactgccccagtaaaggcattgctgccctgactagagaccacccctgccccaggactcagctcagcctccccgaagcccccacctcagaccttggtacccacacagagtcctggggcgggagcaaagctgacttcaaaggcactttggtttcgtcctggagggccctctcagcaggacgccctcctccactggaggctccggtctccaggtttaatctagtctttgatctccctttctgtctcaaccctcaggcccttcaccattcctcaggtgctgagaaccagagtgccctgcgaagggcaggaggatgaggaggaagaggaggaggaggctgcagttgaagcccccaaggtacctggttggcaactgggaggtggaggagagggtacagttctgaggggtgagtcaggggctgcgcctcgcttcccagagcctgagcccggccctgaggcattttcagcatcactgcctggaaaggaggtccctttgagcccaggatgtctgcttgaagagctgccggcttagaagccttctccaaggcccctcaagggcccaggggaaggatcagagaccgggcctttgagctgctgagttcattaggcccaggaacctgggggccagcctccatgcccaggttggcagttctcgacatcagagaggcattagggctcaaggtcatctgtgatgatgggtttgaacattttctattttttagccactgaaatttttcttctagtgaaatcttaatgcttcatagaaaacagatgagagcagcgctgctcggggtgagcagggcccagccggggaggcttggatccttgactccccgccacgcccccgccatggcctcccaccagggtgacaggttcagttgtgtccggggccaggccaccaacgtcagtgagtagcagggcctgatggacactgaggctggggcagcaggcaccccttcccaggggctcctcagcacagcagaggcctggaccttccagagctttccctccttccaggcaaggggtcagcccaggtttttatgtcagatcctgccgtttccacaagttactgattccacttgttgtgttgtgtttttgacacagcccaggcccccacagtctgtctgtggtccttgggtcctggtctccccgagccttggcgccggcgaggggaaatgccagtgtccgggtggctctgctgggttccaggctccccttcgtctctagaggccccctcctggcctcccccctcactcccgcttgtcatcatccggctccagctgtgaccacccgttagccacctctgctgcgaatgggcatgagggtcagaggagggggcttctggtggaaaccttggaccagaacaaccagccgggttctggggcatcaccctgccgcgctgtggctgccccctaactcctggcatgggggacatccccaagatggggccagacacagcccggcttcgggaaaggggcagctcgtggtcttttctcccttctcctccacagcccgaccactttgtgcaggaccctgcggtactgcgggagaaagcggaagccagacgcttggccttcttggccaggaaggggtgagtgcttacagcgctgtgtcggtgggctcgggaagcccaccccacccccgagtgctttacgtgcgttacgtgttgctatggcaacagatctaggaagtagctagtcttgtcattgtccttattttatagacgaaggaactgaggcccagatgtgttaagtaatctgccaaaggtcacacagccagtgggtggcatactccatttctcctctgacctcaagctggcacgggggtgtcctggcccaagcttggtgtccgctcctggggatcttggaggaaggcagcaggctcttccccttcccgtcagggccgcctcctctggctgatggattcttctggggcgggttgttcctccctcaggtaccggcatgacagctccaccgcagtggccggcagcccccggggccacgggcagagccgagagaccatgcaggaacgcaggaagaaggaagccagcaaggccacccgagccaaccacaaccggagggccatggccgaccgcaagagaagcaaaggcatgattccatcgtgagaccactgcgcagggaccagcaggaggtacgggcctcctcgccagtcggccccctgccagggccccaagtccaagtctgctcctcgacagcctcagcttcgcagcccctgagaaggccgcctcatccgtcatccaccagccagccgtgagcgccttcctgcagaacacacagtgccttagcccgcggccgaagaacctcgcggccagcgagcagggaacagagccccagggccagcctcccaaaccttgtgcagccaaacaccacctccctttcttccggacagcgggaaacttgtatattcacaaacagaaaacaaaaaaggccctcagataaaatttttgaccctttcaagaaatgatctgtgcccggcctgtgacctcttcccctccccgctcccgccccccacccagccccgccgtcctagtccagtgatggccgccattgggagcagaagggggcaggacgatgctgtccatcagcctttcgtgcttgcctcccacttcaagccctcctggtcttgctccacctcgccgtgtggctggagaccatcaccctgctctctgagcctcctctccctgcctgtggaaggaggggccggtgtgaggccctgctgtccagcccttactgtgaccttgcgcagctccccgacagccatcctagggagtgggcaggcacgatttccattaccgtagtgccagggagggcggccaggcactgagacataaaggcagctgcccaggccagccgggaggtgggcaaccagggattgggcacgcaggctgagccctggccttcacagggtccttggtcccaacgggtgttttctccatctcacagctgcccaaggacaactggccagtggccacgccagagccagaactcagtggctcttggtcacaca

SEQ ID NO: 223 - DNA, 40799 bp, Hippotragus leucophaeus
  source 1..40799: mol_type = genomic DNA
taactttactaaaaatcacaaaattgtaatactctagtcgggtgaactttctagcatgtaaaatcagtaaaaactcctcctataaagctgtgaacggcagagagaggggcagcttttggtcaggctggggctgagttcctgcatcctccgcattaatgcggagttagcgccagttggccccgcagccgccatcggccgcaactcctggagccattggtcggccggtgggggcgcgcgtgcgcgcgcgtgggggcggaaccggaaccggctgtagccgagggggcggggcctcgagggcggcgttggcggcggctggagcggcggccgcggtggcttggctgggggcagctgctatagcccggagccccatggttcggagccgcggccagaccgcaggagaagctcgatcccctggtcaccccggctgactgtgcgggcccgcgcagcccggagccgccggcgcccgtcgggtcccgccggcgggcgcgggccggtccgccatggggtccctgttccggagcgagaccatgtgcctggcgcaactcttcctgcagtccggcacggcctacgagtgcctcagcgtcctgggcgagaagggcctggtcgagttccgagacgtgagtgtcgcctgggagatgcgggctgtcgctccgcgcctagctccctcattgcacctttcgctcgggcctcctcctccgcgggcacctgggcaggggcgcccgtttcctaagacggggaagctgaggtccactttccggtcagagcttccgcagagcggggcccgggcccagggtcgccggatgtctggtccgcggccgccctggctgggttagttaggaacgcttgtcttccatcagctcgggtcgtgccatctgatgcttcggagccaggcactgggctaattaagcgggagaacaaatctgttaatgcctcttgaagcccttttggaacttacggaggagcggaggaatattaagtaatgatacgtaaataggaatacgtttgctgtactgacaataaaagggaatggtgagatggtgcccccggtaggggcggtcagggaagcctctctgaggaggtgtccttgggctgagacctgagtgaggagtgagccagccctgggaagttctgggggacacggacccaggtggagggaacaggaagagccaggagcctgaattaggaatgaacttggtgtaaactcctgggtggcgggattttttgtggttcactgttacctggtgatgtattgatacaaagcactacctcgtacggaataggagtagagtcagaatttgttgaaagggagctgtccccccaacaagtagtaataaatacttgttttatatatctgtttatttgttttttgtttggcttcaccatggactgtcaacccctgggagtaagagtcttgttcattcctgattcctaagtacagcccctggctttgtggacattaataggcatgaataaacaagcttgtatcaagtgcttgctgagtttggtgctggagactcaggggtgagcaggatggacaaagtccctgtgtttttgttgctcacaatctgggaggagttaacaaacacactctgattatgagctgtaataagtgccatgcaggaaaaaacagtgtgaaaaggagattatgaagcaggacctggctgattgagcttgaagtcacttgagtgaacactttatttcttgggacccacctttcatcaccttggtttcccttcatctttctgagggtgctgtagtttcaagagggaactcttttacccagtatttgatatcagtgatccttgggttggtcccccaaggcaattgcaaggtcagagagaaactcctgaatgacaggtgaggctgcagagagggcccagcttgtcctggttcttggagctacttgggcttcagcacatgatgcccactttgctggcaggggctgtgctgaactataataaggagccccggagagattcagtaaagagttgtttgagaaacaggcccccttctttataatagatttcttccatcctgttagtcctcaggccaagagacttcagtcaagctgaagtcttagaggtttgaacaaatgctctaattactgtgaagattcaagttttgttgaatgccattacattaggtagtagaggacacttgagattcttctaaactgaaaatcagggaaagaaaaagaaagtgctgttcatctttttcagaagtgaaacaaagtggaaacgctcacattgtgtgatgctgggtgttcagagctcaagggtgtatgtgtgtctgtcttcgggatgactctcaagcagctagagcagagagctccatcatacctgactttctgttctcttctggagtttcttactgactttgtgctcaccgggtgggatcactgacgccagtgttttctggcttgcgcaggtgggagcttttccctcttttggcgatccttctaagggtagagaggcaggaccagagtttctgcaatgatagccaaagagaagacctggaaaagaaaggtgattcaactcaccagtaggactcagtgaagggcaaggccgtcccacttttctaagggtctggagtctggggacagtgtttaccttctgtctgttaggatcgcaggtgtggatactggtgaaaacagcactaggcagcctgtacaggtttttctagattaattattagtcttaaaataaatctgtgttaaaatgtacttcgtagcattagcctggaattaaggtgctgttaccacgtaaaaagaaaacagaagctaaacttcacacaagcaaccacgccacagtaggaaaaaccagttaccatgctgtgtaagccggcgaaggcggatgtcatagccagtcatgtgtgtgttgttgccacagaaatttgcctcttcatgaagatcctactatttgtggaaccctggtgtccgatttgatttcactcgtgtttgatattgaagaaaaagacatcaaaactgagaagccgtgtcatttatagacagcttttgatgggcggcttcctctgctcattcttagttctaaccagacagagggtatctggatcactaggaacttgaaagtggtgactggtttgcattagtgtgatttccagaaatgagtgcaaatgtggcaaacagaagtgagattagattttttgcctttcttctggttagttctttatagaagtttggaaaacagaacaagaactgaggctttagggtagatgttctcaggttgttcaagcagcttcatgccacgctgtttgtaattctcttttttgagaatgccccatgccatgtgggcttcccttgtggctcagctggtgaagaatctgcctgcaatgtgggatacctgggttcgatctctgggtttgaaagatcccctggataagggaaaggctacccactccagtattctggcctgcagaattccgcagactgtatagtccatggggtggcaaagagtcctatatgactgagcaactttcactttccaccccatataatgctgcgtggagtaaacgtaaaattcttgccccatgtacctttcaatgtaaaaaattactgtaacttaaaaagttgtaatatatgtccattgtgggaaatttggaaaacctaaagataataatttccataatcccattagctagaaataaacactttaccattttggttaccattggccaacattatttttctaataatattttaaaatgcacatgcatagatatttttatataattggagccacgctaataatgtgtgcatgcgtgcgtgctcattcgtgtctgactctttgtcaccccatggactgtagcctgccagggtcctctgtccatgggatttcccaaggaagaatactggagtgggttgccattttctcctgcaagggatcttcccgacccaggatcagacctgcatctcctgtgttggcaggtggattctttaccactgtatcacttgggaagccccacactgataatatgtttaatctcctcttccaacacacaagttgtgattaatttcctcattttattaaatattcttttatagtattttttgttgttttaagctttgtatgataagatattaagtagagggaagagtatatggaaacagtgaattcctataaacccatggtgggaattccctagtggtccagtggttaggacttggtgcttttactaccaggaccccagaaagccatatggtgcaaaaaagaaaaaaaaagaaaactcccatcagacaagatcattttgaagcaaatcccgtatatattatttcattcataagtatttcaataagtacctctaaaaggtaaggacgctaaaaagataccattatcacaccttaaatttttaataataatttcttaatataatcaaatacctagtcatttaaaacatcacttttaataaatgtatagtaatcaattatattactgacccataatttttatacaactttattgatgtgtatcataaagtttgcctgctgcaagtgtacaatttgttggttagaaaattttttgagtactgtgtctgttgccacaaggcagttttagaacatgacatcatcccagtaaggtcccttacgctcatttacaggtcatccccctcctcactctaagacccaggcggtcactcatctactttctgccgctaggttttctttgcctggacatttcatagaaatgcagtcgcacagtctgtggccctttgtgtcttctttcatttgcatcgtgtttctgggtgtctcctccctgatactgatgtattggttgttttttcccccgctttttactgctagtattccgtggtatggatgtagatggtgatctccttggttgttttttccccctctttttactgctagtgttccgcggtgtggatgtagacggtgatctccttggttgttttttccccctctttttactgctagtgttccgcggtgtggatgtagacggtgatctccttggttgttttcccccctttttactgctggtccgcggtgtggatgtagacggtgatctccttggttgttttcccccctttttactgctggtccgcggtgtggatgtagacggtgatttccttagccagttttccacggtcagtagttttttctctatccttgaagtcgatcctcttcttcatacatttttgtctgtatccatagttttttctttgaggtttaatttcttcatgggatcgttctggactagaggatatttttcaggctttttttgggggcggggggagtctgtttttttttttggctgagctgggtctttactgtggtgcctgcactctctagttgtggtgagtgggcttctagttcccccgccagggatcgaacctgtgtcccttgcattggaaggtagattcttaaccactggttcaccagggaagtccccaggcttttttgggtaacagttgccagattgctttccagaaaagatgtgtcagtttatactcccactcagtagtatacaaggatatgctcttcccttaaaccctggcagttgtactttatttataaaatcaaagttgtttttaaattttagaaaattcagagcaaaattttcatccttcttctcagctcaaccagaatgtaagttctttccaaagaaaatttgttggtgaggtgaagcgatgtgaagaactggagcgaatattgggtaagtttttctaaacaacttaaataattattttgtataattgaatatataagcaaaccttgttcactttagaaaaattagaaaatctagacacgtagaaaagaaaaaagaagtcatctgtattctcaccatgtaatcactgttatgtaggtttatattatcgttccacactttttactgttcatctataaaactaaggatttacatatattataatcaggttattttgttattagctttgtttctcattgaatgatactttaacatcttttcatgtcagtaaacagattgactcatgattgtttttaatggcagcatagtattttatggtattaatatactatgagttatttagccaatcccttgtagtttgttataacttagaagcaacatatacatgttaatatattacttaaaattgaatcagagcacaagggaggtaggaagtggtagatagattggttagtaatttcctttttctcagacattatttcctttgcatacatcagtgttctctgactgttaaccattaaaactcagcagctcaaggctacttcctttatctgtaaaacttttaacatcttagcctaaaataaaatgttattgttgtccagtcactcagtcaagtctgactctttgagaccccatggactgcagcactccagccttccttgtccttcaccatctcctggaccttgctcaaactcatgtccattgagttggtgatgctcttcaaccatctcatcctctattgtccccttctcctcctgccttcaatcagggtcttttctaatgaatccgctcttcacatcaggtgaccaaagtattggagcttcatcttcagcatcagtccttccagtgaatattcaagactgatttcctttaggattgactggttggatctccttgcagtccaagggactctcaagagtcttctccagcaccacagttcaaaggcatcagttgtttggcactcagccttctttatgatcaactctcacatccgtacatgactactggaaaaaccatagctttgactacagggacctttgttggcaaagtaatgtctctgctttttaatgtgctgtctgggtttgtttcttccaaggagcaagcatcttttaaaataaaatagtctttatcagttcaaaccttgacgttttgattgaaatacagagaggggaacagttccaaagtcactgtcagaaaaacctgaggaaaagagagttgaggaggggagataaaggtgacttttagaatgatttctaacagttaattattgtggattttatattttttaacttggatttttaagatcaaaagaaacctttgggtcatcagcagcctagtcctctgcatattgtttgagatccaagtcatttgtgtggatcgtgaaagacagggcaatatcacacttccttctttgccatgtgcatgagtcattggacaggttgtatatttggaatgagttttcaaagacagagcaggattgacaggacattagacatgcccagggcttcctattgctttgttgttgttgttaagtcacttcagttgtgtccgactcttcgtgaccccatggactgcagcccacctccatccatgggatttgccagcaagagtactggagtgggttgccattgccttctcctgtagcttaaactgtttcataaagaatccagacttaaaaagaaaatgaaccatcaagtacatttaggtatgtgccgtgctattctgtgcttagttgtgtcctgccctttttgaccccatggcctgtagcttgccaggcttctctgtccatccggattttccaggcaagaatactggagtgggttgccatgcccttctccagggatcttcccaagccagggatcaaacccaggtctcccacattgcaggcggattctctaccatctgagccaccagggaagcccaagaatgctgcagtgggtagcctctcccttctccaggagatcttcttcacccaagaatcgaactggggtctcctgcattgcaggcagattctttaccagctgagctactggggaagcccaaatttaggtaaaataggttaaaaaaatttacatccatttccaaaaaactcttaagcccattgcttccttattggtaagacattctgcctgttttccttcctctctttctccctctctccctcgtttcctcccttccttccttcctagtaaaataactagtaagacttctccaaaatattgtatctagtaatgattttttaccaggtattatgacttatcctacagaaaaggatgcttcaaggaattgaaaatgtaaactaaagaatttaagttatttttggctgtttgagtattagtttcatgaatctagtgtaaatcgtcctaagtcaaagcatcacagctcactggtgactcaggagagccgggctctttgccctgaggttgctctttttgctgagaaaggttgttgtgtttttcctgatggatgtatatttcctcctaatggcatctgtagggagttcacactgacatctctggtggcttattcctggtacttccgagtgtgttcttaacttcctgcttcatctacaggtggcagaggcaagtgtgactccaaagttctttaactagagttttagtgatgaagggcgggaaatttcagaaaatctgtgtataggttactgtcactctatgctgctctctctaggcagaattagtttacagatcttcagaagcaaggtgacaaaagtcatctgtcagttgggacaatcaagacttttgtgcctttagatgacacaggcatgacactttctgggaaaagtggggacatgaaatgttctcactgaaatgtcctggagtaagtttttcagtctaatttgtttaacttttccacagcctacttggtgcaggaaatcaatagagctgatatccccctccctgagggagagaccagtcctccggcaccacctctgaaacaagtgctggaaatgcaggtaacttggttcagaaggagggtttggggtcactaacctcagattgggcttattcacttaccttatactgtctagtgcttttctgcctttcttctcaagactgtggaatgaaagtcaaagcaccatgttatgattaactctcagtaacagattgtctgtgatacattttaactagaattcaggttttttccccttagtgtaagacaggtggtattgaacagagattgataagaattagatcatgagatctggtcgtgtaacctctgggcttctgcaggccttagcatgcttctgctactgcaggtcatcaaggcttcaggcctgtgcccttcacattctcccctgattcatgctgaccctttcccctggaattatcagaagttagtgtgaaagtggttccccatggtcagccagcaggattccttctcttggagttcagtgtcggggatacactgtgagagcatggggtcattcattcattagcatccccttctaaccccatgaattatctgttgagattttggtctcctcatctgagcgttcatcacactcggaaatagactagagcttttacagcccttctaaaacaattagtactgtataactaggaccattccattgccgactgctctgtttgttttactgggaggaagtcatttagcagttggtatatgaacggactctggagacaactatacagtccaatgagagcagtcagctggttcgcggcctgtttggtgtgttggttgtgatgtaattacaaatacggtgattgctagctgttatcaattctgtaaagcagagcacaagtaataagtgtagtgtgtcaggggatttgtttgaatacaagttgtcattgactcagtgggttgttttacagatttctgcttctactgttttaatacttaaagtattggtaaggatgcttggtacacaactaattgttaaagatttgttctcaagtatttttatgtctaattaattgaataagtgcaactgcatagaaactcaggctagagactaggaataggtatgtttgggaaagagtgtttttctgtgttacaaataaaaggaaatgtagtcttaaaagaggaagactctttggtgtatggtaatgtgtaagcagatgaagggaaaccagaagaaatgataagacccgagattagcactcggagtcatcatggcacccaagtgcttgccatcacgggtacctgaattaatacgaaacagaaaatgatgaactttgaaaacctgagcatgctttcatatccctatcaaactgtcatatacattttggctttttaaaacctctcctggtcctggggtgctgtgaaaagagtgttagagccagacttggaagtaacccagccgttgtttcatttcaggagcagctgcagaagctggaggttgagctgagagaggtcactaagaataaggagaagctgaggaagaacctgctggagctgattgagtacacccacatgctgcgagtgaccaagaccttcgtcaagcgcaatgtggaggtactggtgatgcgtgggaggaagtgcctttctttctctttcttttggccgcacggcatgcaggattttagttccctggctagggattgaacccaggccccctgcattgggagagtggagtcttaaccactggaccactgaggaagtcccaggagtgtgtttcttttataaaatctcattcccataaggttttcaggttttgttatcaactcctatagaaatactgctttttaaaagagatacatctttaaaaaatgaaagagatacattttgatcttcgctgtatttttcagttggattccatgttggttttaaccgtttgctgttgtttagtttgctaagtcgtgtccaactctttatgacaccatgaactgtagcccgccaggctcctctgtccatgggattttccaggcaagaatactggagtgaattaccatttcctcctccaggggatcctccagatccaagggtcgaaccagtctcctgcttggcaggtggattctttaccattgagccacttgggaagctccagctttaatataacttcctatttataaaatgctttagtttgcagttgaaaaaaagactttttatgatcatgagaagaaactgaacagtagaaatcaaactccaaagtttcagttttattctttccttcttctcaaattcctaaaagtaatggaagttaaaaaaaaaaagaaaatctatataggaataaagaacagcatatgcagcagtactgtagtcagctgagcatcagagaggggcaaagtatattccctctgaacttcgtttcacttcctgtggcaggtgtgacctctgatacagttactctgtgttaggttaaggcgatgacatatgttataatcagacttttattatatgtaaatgtcatcaagtagtttacaaataaggaatggggaggttatcctctttgtttatcagagcggactcacatgtctgagttaccttggcacccagatctgagtagttctgatgctgtgcagacttgtttggaaacaggacttgggaattaaagtgtcacttttggtgagacacgcttggtttcatgtctctttgtagtttgaacccacttacgaagaattccctcccttggagaacgagtctttgttggactacagctgtatgcagaggctgggagcgaaactggggtaggtgacacctggcctggcgagcttcacactgtccttcttgtcagtgggagatgagagtagatgagcagccaccatctgcaagcctgtgtggaatgaaagaaagtgaatatttgtataagaaaacactgtactctagaatttgttgagttgaatcactcagctgtattgactttttaagtaaatatgatgggaatttcttcttttggtatcatgaactggaaagaaggaacatttatcccattcatcattacttcataagcttcaaatagttggttattgaagcataaagccctgttttgtttggttggaacataggggctaaactgaattgggtaatttattaatcatattttaaggggctctctctactgtttattctctctgtttacttgagctaatggtaacttgtttcctcatgtgatttgtaatctctttttactatgaacttcggttcctttgctccttatctgtaggaattccgtgatgtttagtgtgaggctgtatccttcagaaagaacttatttttacatatgtcaggtacttgagagcactccacctgtttggaatctgcttgaggttttttttttcctgtttgtttactcaccctgcacataatatgagtttcatccacaaacctgagtgcattctaacctgtggttgtaaatcatcaaggaatgttctcccccttctcctcaaaactgaatgaaaataaacaagtttgcatgtaggctcctttgcaagatggattcttttctagtccacccattcacttcaggtgtagtcctttgttgaggggggtgagagtcccaacattgaggggattgtgaggctttagttccaactcctcacctgatacagacccagggctcctctgccatgctggtcttgaaactcaaggccttgagatactggttacatatagatactggctccatataatacatcaggacataactatgaagtcctgttttatttttggattccaagaatttctctaaattatgagctcggctttacattgaagaggatgtttcaaaaatatttcatccagcatttcagatattgttcagttggagagctttcagggtatcttccccattttgccagaaataaatgtcttcatcatccttttactgcagtttgataatattcattgcttttacttgaccacagcctttattgtctcatagatttgtatctggcctaattaaccaaggaaaagttgaagcatttgaaaaaatgttgtggagggtctgcaaagggtataccatcgtgacctatgcagagctggatgagcccctggaagaccctgaaacggtgagtaaatgtcaccatctcctttgagcggtgacagacttgccccagagctagaggcacagtcctgagggaagcatttgagtgagttgttgactggatcccttcttatccttggatacgtttggggggagttcctgagaataaggactttctcctgttctactgacgtacaacagtggtgttaacgttgtcacatcactgcattctgagcttcagattcagtttaggtttcggcagttgtcccagttgatccttttacagcaaaggatctagttatgaatcacactttggatttgtttgtcatgtcttttttcttgttgccctgcaaggcttgcaggatcttattgaatagatccccgcccagagatggaaccctgggccctcagctgtgcaagtgcagagtcctaactactggaccgccagggaattcctacttgtcatgttcttttggtctccttcattctggggtaatttctcagtcttaccttgaccttcatcgtcttggcatttaaaaattattatagaccagtgttttgggtagaatgccccccatttgggtttgtctgatgttttctaatgacgagattcaggttatgtgtctttgtcaagaatgtcctggaagtgatgttgccttctcactgcttcccatcaggggcacacaattcgtttgtcccattactggtgacattcactttgatctatctcgtgatcaatactggtgatgttcactttgatctcttgatcaaggtagtgactcctagtaatctctgtgaatttgtaactccttttcctttgtatttaatacatgtttttgaggaagtgctttgaaactctataagtactcagttcctcgtcacattttcaatcagttaatttatttcctgttttattcaatgagttatactctgttactttaattttttattttgatattcaaattctctagatttagccagctggagcctattcagctagattttgtattctttttgcatgttcccatcatcttttgaatacttctttgctttcctgataactatatgcagattcattttgtaatttccctcatgcagctctggaattagccatttctctaaggagcttagttctctttagtggagaatggtaattagaagccacgctgtggtttctgggtgtgcctgttgtgaacgaggtgatgctgttcccagctctgtcggtggacagagggtgcacacatgcaaatggctcacccactcacaactttatttctgtacctgtgtgtgtgtgaaagctgtggctttacatccaattctactccagcgccatagggttggttcatcctgatttgtagagttcatttgtagggttcatttctagatttgtaactcctttcttcaatggggagaaaatcaactcccattattgtcaatatacttatttgatcagtccccttgtatgtgaccagtctgccccctgatctcctatctctgctgccctgaccttctctccatacggagtttcaagttccccagcccctagactgagtggctccttggtgtgggggccctgctcaccctacctgggtggctcccctgcggcatgtttcctctctttgcttgggctctgattttgccctgggcccttattgcccttcccctcccctctccaggtccatccctgaacgcacatctaaggcttcaggaatgaattattcaggaagggaagcagaggagccagagaggaaagagccataattaccttttaaaatagctgtgatttttaatgtttttgaagacttcaaccataaaaataactattttgctctaaatgaagatgaattgatctactaaaggtagaaaaggaacttgggcctcttaaattttgagagaagtgttcatgtgttctttcctggatttgccttaggaattctggctgtaatgttcagttgtgtctgactgtttgcaaccccatttactgtaatccaccaggctcctctgtccatgggattctccaggcaagaatactggagtggtttgctctgttcttctccaggggatcttcctgacccagggattgaactcaggtctcctatattgcaggcagattcgagggaatagttttgacataaaggattttggctgtgaaatgatttttataaggtttagcctgagtaaatcacacatgttggaaaatctaatcggtcaagctgttcattaaccatacacttacaatattttttgtgcctcctgaaattgccagtagcaatatgttaattatctatcacctgtgacctctgagacctctccatgtaaagctgaagattaaaactgttctgaagtagcatttacatattgcttgagttttttctttattgagaacgttatccttctcatgcaaaacataaaaatttttttaaatacaatttctaagctctttggtgctgagtttataccagtaggttaaggggcattaaatgtctgtgaagaaatacagagacatggatagagatgtgtgtgtgtgtgtatatatgtattaattttttttaaaaaaatgaaatatctctgtatttctgattctatttggctgcactgagctgcatcttcgttgctttgcaggggcttgctgtagctgtggcaagtggggtctacgctctagttgtggtgcatgagctgcccattgcggtggcttcctttgttgcagagcatagtctagttcttgagcatcagtgcttgtggcctagttgccctgtggcgcttgggatcttctgaaccaggaatcgaacccgcttcccctgtattggcaggcagattcttagccactggaccaccagggaaaattttaaaagttttaagtttcttaaaaactttttttatttctaattttttgttgaagtataattgatagaaatgtgtatcttaaagccacaattcctcccttccccatgattatgaaggaaatgtgagctcgttctagagaactgagaataacatagaaaacacagagatggaaatcagccagtcacctgtaatccccctgctcagacagggttactgtttaccttgcagtgtgcgttctgttagtccttactctggggaggatgtgggatttggtttggtaacttttactcagattctaggatttgtttgtagtgtcatgtttagtatcttttgggtccaatatctgacctttaaaagtccttacaaaccccagagtgtatttctagccattttctcctttgtcagtatcttttttagacgctgaccagtctctctgtcaaagctagacttaggcatgtggtttcggatctgtgttttttatattatatatatccctgttccatattatgtcttaggtggttgtattccctgacacagtactatttttaaaatcattaaggaatgttcaaagtaaaattcactggaaatgccatttcttttctcctccagtgtagtttctttaataatttatctggaaataatttcgatttacagaaaagttgccagaagagaataaagacttctgctccttcccaactgttacgtttcgctgcgtgtactgttacccacttgctgcatatctagtcccattttctttttttaaaaaaagtatctatttttggctgcgctgggtctttgctagttgtagtgagtgggggctactcttcggttgtggtgtgcaggcttctcatcgtggtggtttctcttgttgcagagcgcatgcgctaggcacgcgggcctcagtacttgtggcacacgggcttagttgctcctcagcatgtgggatcttcccggaccagggatcaaacctgtgtcccctgaattggcaggctgattcttacccactgtaccacctgggaagtcccatccccattttcattcgtcttcttgcagaccttctgagaggaagccatggacaagtgtccattgcccatcacagggatgctgttttggacggtaagccatcaggctcctctgtccatgggattctccaggcaagaatcctggtgtaggttttcatgccctcctccaggggatctttccgaaccaggaatggaaccatgtcccttatgtctcctgcattggcaggcaggttctttaccactagcaccacccggggaagcccaataaccacgatacaaccctccaaatgacaaaaatcaacatgcacacaacactttggtgcggtacaaacatgcccttcagactcctcacagtttgccttgtttccttgctgttccactgccctaggggagactgtgacctgcattcgggacagacatcgtgttctgtgggacgaccgtcctctggggtccattgagtgcttcctcgtgaccaggctctgagcacacgttgctgacgggaacatggatgctccggtcctctcagcacctcccaccagggggcatgggatgttggcttagtcatgttggtgtccgctaggttcctccactttcatgtctcccttctgccctatttaactgttaagtggttgctaggagatattccaaggttattggtctttggggcgtcaatcctcaccaaacttctacccaccagcctcggcctctgtggcgactctctggaactcgtcacctctgtcgctcgcagttgccatcattttcccttctgggcttattggttaccatccagcagaaggcggtgctttccctgccctcacagtcactcattcatccacgaactcagaccttcctttgttggatgacttgtgttctgttgcggtccgtgacttggccactggcagtccctctgcacacgtttctctggcctttggcacgttctcagcattcagcaggcagtcccttacttcctgtcacataggatggtcctggtctccgcctggagtcagccgtttcttcaaggacccccgtaccttttagtagaggatggaatttagaaaccaggatctgggtattcgagttctcgttgtgtactggagtgctgttgtttctgggccctttcagcagtcagacatgcacacataccacgcacaacacacacacacacagctgtaaccacttctgcagctgcctgtgcacatttatcatagaccatttgttcagggactttcctggtggtccagtggttaagactccgtgccaccagtgcagggcgtgtgggttcgatccctggtcaggaaccaagaccctttatgccctgtggtgcagccaaaagagtgaaaaaaaaagaaaaacaacagccccaaacctgccatttgtgcagactatatgctacagttttagacgtctctttttctgtctttttcactctcttctgatagtgaaaaatctggctccccttatcgacaatatagttcacgaattgcgtaatttaggtatttattcagtgtatccagccacatcagccgtcacctcccccctctgcctcccccgtccccggccaccttgtgtccttaccttcaggatcccaccgcctccgctttgcctgaaggtccccggcctgtttcctgtcccatgttatttcacggcttttgaagccaccttttaaataccatctcccaaatgggtatactggcttggacctctgccccaaataccagacttctgttgaactggctcctccgtaactttgaagttccctgaagacatttccacaggacgcttaaaactgaactccctcccaatcttcccctgcctcccagacctgaccttccagcttgcctgtctcagtcagcgacaactcagctctcatccttccagcgtccaggatgattcctgtgaaactagtcaaactccccccaccacacccccaacctaaacccctcccttggcttcccgtctcactcagccaaaagctcgaagcctcccagtgtcccagccgggcagccctctggccctcagtctggccatttctcttcaggcaggctggccttctcacttgccctcatctcgcctctgtctgagctttgtctttggctcgagaggctttcccccaggatccacgtggcttgctccttgccccttcatcctctagacccagatgtcaccttctccaggaggccttcactgattgcctagtttaaaatcgcagtccccagcccgtgtctcccggttacccccctcccggtcacccccctccccccagctttattttcttttttataattatttttatttttggctgcactgggtctttgctgctgcatggacttttttctagttatggcgagtgagggctgctttctggttgtggtccttgggcttctcagcgtggtggctgctcttgttgcagagcacaggctccaggctcacaggctcatagttttggtttctgggctctagagtacaggctcagtagttgcagtgcatgggcttagtcgctgcatggcatgtgggctggaccaggcatcgaatccgtgtctcctgcattgacaggcagattctttaccactgagccaccagggaggcacagctttattttctttatcaccctcatctccgcttggtatattacgttctttctttgtgtctctcactgccaacctgaatacaagcttccctgccctcctaggtcaggaacttttgtctgttttgttcactgctgtattcctagcaccgggaacagtgcctggcaaataggccaaaaacctattcgttgttagttgtagaatacttgtaaatgtagtcagttctcatcatttgcatagttatgttgtacagtcttcatgagaaccgagccattgctcctaggagaagcatagggttgggtccctttgaacctctggtcacagtgtttttgtcaactgatcagtccataacctcattttatacgtgttctgtttaaagacaccttacttaatatatactattgattcattagcattgaactcactgccaacccatgctagcatgcatgtctgagcaactcatatgggacacacttgagggcaactcacagcctttctgtgctcaggaacactaggcagcactttagcaccacccctggggaccgtttccagtaccgaaattaccaacaaaaggcacagaaatgcgaaaaacttggagccagacggaccacaaaaaggacacgtgtttacagtatgaactaatggtcaccttgtttgacctcaactggaatatgcacgttgaggaactcaaaatttttgtcactctgcatgtctgcagatgagtgaaaaactgctgcaagttttggttttgggggttatatctggaatgaatttgcaattgtggaatctgcagataatgaggatggacagtgtttgttgaatgaatgaacacattaatgaactaactctgacagagtacgagctgccagggttttcaaagttctatctgcagaagtaacagtcatctttatcctttgtagggagaagtcataaaatggtatgtgtttttgatatccttttggggagagcagattggtcacaaggttaagaagatatgtgattggtaagaaaaagaaatatttcatttcctttatttcttcattctcagtaacctctagttttccttaaataggtctctgaagagtaacacagtggttgcagaggctgctgggctttgttacgtgatttctttgctctaatgccatgttttcagacatttaatttgtcatctgccttgccagtgtaatacttaagataatttgaaagtaaacaccatgtttttaacattcccagatttgatttctttcttgggaattaaggctcaagatcaatccaggaaggaatccaggtttactatttgctgcctttctgttgctttgagccacgcatcagcacatctgtcctcctggagaggatggctcatcctttgtccagccctccacagttagctcctttgccctggggaagggggcctggcaagtggtggagaaggtgggctcagaggggcctgcctgccaaatgaggtggtacaagaccacgtgaacctttgagaaacccagagcagtgtaccagcaagagtcagtctgtgactgagttttgtctctagtggggaaataaggccacaccaaaactcaaaagaatggccttttgtttccttatactctgggaaattttagctggccttgcttcttgctggggtaagggtggaacttggttatttcctttggatcagtgttcaccagagtttgatacacagtcactggtgttatgaaaagtaattttaggtgttacatgggcaagcttgttcttactttaatagatgtatatttatctttatgtagatgacaaaaactatagccaacacataaatccctgacttcacaaatatcattgcttaagataaagctagagtaagaatttaattttgatggtcagagcgtagagagaaatagaaagcatggcattcaaatactgaggcagcatgggagatcttgcagcttgggaggtgtggccctgcctcctttctgacctggtgtcacatgtccccaggggatgtttactgtgaaagtgaaagaaagtgaaaatgaagtcagtcatgttggattctttgcaaccccatggactgtagcctacgagtctcctccatccatggaattttccaggcaagagtactggagtgggttgccatttccttctccagggaatcttcccgaccgagggattgaacccaggcctcccgctttgcaagaacttttactgtctgagccactgtagcacgtgtcaagggcaagtgccaagaatccagaactcttttctcccttgattttctttttttacttcaagttttttgtttttaaaaaaatggattataattagttgctttacaatattaatttcagctgtaaaccctgcagatcagccatatgtgtgcatatatctcctccctctggaaccttcctcccactgcctcatcccacccccttggtcatcacagacccctgagctccctgtgctgtacagcagcttcccactagctagctctttcacacgtggtagtgtatatatgtcaacgctactctctcaacttgtcctgtcttctccttccctgctggagaaggcgatggcaccccactccagtactcttgcctggaaaatcccatggatggtggagcctggtgggctgcagtccgtggggtcgcgaagagtcggacacgactgagcgacttcactttcacttttcactttcatgcattggagaaggagatggcaacccactccagtattcttgcctggagaatcccagggatgggggagcctggtgggctgccgtctgtggggtcgcacagagttggacacgactgaagcgacttagcagcagcagcagcagcagcagcttcttccctgctgtgtccacaagccgtctctacatctgtgtctcttatttctctctcctttttttaaaggtaattactgtatgttctttgacttatgttctacactcccagcgtaagggtcatggtgaatttagaacattgaaattgggaatgagcttttaggaatcattgagagcagaaatggaatttggagccaagagagagttggctaaatccgtggaattcagtggacatttgtccagtgtccatcggcaaggccttagcatggccgggtgcctgtgtctgcacctttttctctcggagggctgcttttattctggtttggaggaaatgtgcccagatggtgtattcaatttacctctagttttctacaccgcttcctgtagttctgatggctgcggcgctgtctcgaatcctgtcttctagttaccactgccacgtttacccctacccgaacacagccgaggagcgcagagagatccaggagggactgaatacccggattcaagatctttacactgtgagtgaaccagaaacttacctccttatctgagggcttgtgaaacatttacaaatccgtttagtttcttttttaatatggaaaattttggttgtggacaaatcaagacattttagggagactggaatgtcacctcctttctcttcgtgggagtttcattttagcagcctgttagaaacctagatggtttctaaatgatggggctttaaaaaaaaaaaaaaaggagtctgattatctttgatctgctgaagtgtaattcttcatcagatagtatgagtgagccccatgtaaagtgctggctgtaattttaccagcactgttttaagtcatctttctgcttagaagttcactctgacccatttgagtgaaagagggtttcttggcagaatgggatgggaattgatggctcctggggttgacaggaagtggggtgaggctggagtgggtaagaactagggacctaggtctctgggcccagctaggccgtcatgctgccctgaggaccacaacacctcactgttcctgtgccctgggctcctgttcgggagaggcagctccaggcctggaggagaaggactgaacttccttccttcctcgggggcagagagtccccccgcccccagcggaggtcaggtgcctggcagatgctctgctgagatcccgtgtgtttgtcttcacccaggtgcttcacaaaaccgaggactatttaaggcaagtgctgtgtaaagccgccgagtcggtctacagccgcgtgatccaggtgaagaagatgaaagccatttaccacatgctgaacatgtgcagcttcgacgtgacgaacaagtgcctcatcgccgaggtctggtgtcctgaggctgatctgcatgagctgcgaagagcactggaggagggctcggtgagtggctctcccctcccctcccctctccccactcccctcccctgccctcccctagtctctctcccctcccctcccctctctcccctctcctcctctcccctcctctccctgctggccctttcctgcctgagctcagggcgatgagatagacaggagaaaacaccatgtggatgcttttgaactgaaattgcagtcactggaagctctgtgcacgtgcattctcttttccttaattgaagtttagttgctttacagtgttttcctgtatatggcaaagtgatttgcacaggcttttaaaacaaacctttcattttatgttggaatataaccgattaacaatgttgtgataatttcaggtggacagaaagggactcagccatgcctatacaggtatccactctctcccaacccccctcccatccaggttgccacatcacattgagcagagttccctgtgctgtacaggaggtccttgttggttatctgtctaaatatagcagttgcagtggcattttaaatttgctcatttgagtaagtagttcagtgacatgttttacaagtcaaaaaaatattattaaagaaccagtgaagggacttccttgtacccaaagcctagttttgttcagttcccctgctcaaagacaacccttgttttagttttattatgtctttgagtttcttaatcatagatcaaataggaatatataaaaggggagaattcccttccctcacaatagattatgtgctatttatgcttccttttcttttaagaaaacttccctgctttatagctgtttaatatccggatggaatggatgttacatggtttatggaactagtccctggtcatttaggtgatttccaactttgtgaatactaccagcacagagactaacacttgacctttgacaattgagacacgcacagatttgccagattctggatagacccaggatggaattgctagatcagttttgccagatacttgccagatgaatgcaactagttgttgcatttccccctattttgagtgagggtgaatatctttctttcattaaaaaaaaagaaaaatttattttatttttgtctgtgctggatgtttgttgctgctctcggcctttccctcgtcgaggcgagtgggggctactctagttgtggtgtgcgtctctagttgcagagcatgggcttagttgcccctaggcatgtggtatcttcccaggccagggatcaaacccaggtcccctacactggcaggtagactcttaaccactggaccaccagggaagtcctgaatatctttttgtatgtttaagagcctttgaattttcactttctggtgagctctctgttcacatgctttgcccattttccacttgggggttagtccttttcttactaatttccttagcttgttgtctgtgatacaagaacaaatattctcccccagttctgtcacttgtcttacggtttctttctgtttgtttgctttggtcatgcggaagtttttggttaaatatacttccatttattcaacttggttgaacccattaatctcagttcctgtggtctctgaactttgctgctgctgctaagtcacttcagtcgtgtccgactctgtgcgaccccatagacagcagcccacgaggctcccccatccctgggattctccaggcaagagtactggagtgggtgccattgccttcttcctctgaactttgaataataggttactctcactttaggactatgggctcagtctcccgtgttcctgtgtgagtttttttttaattggggtataggtgttttacaatgttgcattagtttctgctctacaagaggtttttctgtatcaaaacttagttctttactgaaaataacaggtttgcatacttcaacaaagaaacatgtattcttatgagcttttggttaatcactttgtttcttcacataattctgtgatggtacaaaaacatcaaaataatgatggcataaaaatagttattctggagtatggggcatctgttgtatttatttaaagatctagatgattcttatttattgaggtagcatcagttttgagagacatgactggtactctagtgcctatgtgtgtatataagtagccccagggtcgccaatataaaactggaattaagtggtttatctcctaaaaatgttaaagagaaatttagagacagctacaatattataaaaatgaaatatagggaaggataaatcagaatgtcagtatggcaacattttggtttatttttgttttactcatcactgcccacttcccaccactcagccttgctagattcttccttctgtaagaccgcaacccccaggcgtaccccacctccctaccccaggagcctccctcagttcctcgtgtcactcctgctatactgaacctcctggggggtggtgatcagtacttccccatgtggccctgcacagggccttgcatagcaggccaccaagatttgttgaaagagctcttgggtggtaattttttctttttttcttcttttcatgtgaaagagagagagcggtagtacgatcccctcattcatgaacacaatcccaacaaaagaaactcccccaactctgatccgtaccaacaaattcaccgaggggtttcagaacatcgtggatgcctacggggtcgggagctaccaagaggtgaacccaggttggaagcctgaatttgctagtctttatattttatacattctgtacatcactgctgctttttttcccctatgagaacgtaatagatatttggaaaaataggctcactagtaactgttctgttatttagtataagctgtttattttatttttgaatgtgcctgggggcatgtggaatcatacttcccccagcccgggattaaacccatgccccttcattggaagcatgcagtcttaaccactggaccaccagggaagtccctaaagtgttctttttaacctgtcaattctctcttgagaatttgggagaaagtcaatatcattatatgcggttgtgtttgcattaactagaaatttctgcctctgctgccagtcagaaatctcttgcttttcctgcagctctcttcaccatcatcactttcccctttttatttgctgtgatgtttggagactttggacatggttttgtgatgttcttatttgccctcctgttggtgttaaatgaaaaccatcccagactaaatcagtcacaagaggtaaaaacataaaccctccagctcattatctcctgtgaggtagcattagtagtgattaccttctgtttgactagaaaaagagacatttaaaaatgtttcatttttggcaataacggaaacccacctgactgagacctaggtggggtgggtctttattcttgtgtgatgggaagttccgtgccgtgaacttgatttttatttatatatatatatattttaagtgtttatttatttggctgtgctggatcttagttgcagcatgcgggatctttagttgcagcatgcagactcttagttgcagcatgtgggatctagttccctgaccagggatcaaacctaggtcctctgcactgggagtgcaaagtcttagccactggactgccaggaaagtccccatgagcttgattgtgagcagcctggagaggagcggttaagaatgtgccccgactagctcgatcacttcagcccctgttccccgtggccctatctcactcaccacacttcgctccccacagatcatgcggatgttcttcaacggtcgctatatcctcctgctgatggggctgttctcagtgtacacgggcctcatctacaatgactgcttttccaagtcggtcaacctcttcggctccaggtggaacgtgtctgccatgtacagctccagtcacagcccagaggagcagaggaagatggtgctttggaagtgagtgtctgcccggctgccagatggtgtctaaggtggagggcgtcactccgaggctccctcccccatcacaggaggccctcacccttcttttgtgttacagtgacagcgttgtcaggcaccacagcgtgttgcagttggatcccagtgttcccggagtgttccgaggcccttacccttttggcattgatcccgtgagtatactcctccccttaatatctcaagtttctcgctagtaccacctaatttttcagtgaaaaatgttgttagttgtaaccactccgtgtggcttattcccttaggaataagggccttagttccctgaccagggatgcagcacttgcccttagcactaggacctcagagccctaatcattggaccaccaggaattcccaggatcacctagttttaactgctacagaggtttcacagactgtccagcacggttcaggtggttttacctaaggggttggttctcggggggtttctgtctggatgacagaggctcaccgtgtattccgagtcaggctggtgtgcagatgaagctgacagtgggagaagccaggatcagtgcctgagtagaagcccacagagaactggggttacagtctgtcctactcccggagccccctgattctagtgaagagtgccgtgaaacgtgctgctcccacttctttgtgcacattaattgtttttttatcttttgttttagaaaaaaatggtatggaattttagaatgggaaagggggctgaagcttatcatggtgcttactggggtggtggtttgaaaggggaaaggtgtggggagaaggaaggagaggcagtggctctggggctggggctgtccccacctacccgccctgccatggggcttggcaggcggctgcttatgaggcccaggcagcgtctctctatactcagggttcttctcgaggaatctcagccttaagagaagagcttagaaactacctcaagggacttccttggtggtccagtgtctcagactctgccatcctgatgcaggggacctgggttcaatccctgaccagggaactagatctcacatgccacagctaagagttcacatgccgcaactaaagatcctgcatgctgcagctaaaactgggcgcagccaagtaaataaagctgcgtcagaattggtttggagggaggtgatacagtaatgaaaagaactcactgacaggagtttgttatcctcttatctgagctctccgagggaacctctctcctaattgtttattcttgtctctcaacataatttacataattgaatattgttgcctcgagtcttaatacgataggaaacttgaaaagccttgaccacggtttccttaaggaatagcacttttatcctaaggcagttgaagggagttaaagttctcttttttggtgttttgttttgtctgtagatttggaacttggccaccaatcgtctcacttttctaaactctttcaaaatgaagatgtctgtgattttagggattactcacatgacttttggagtcattctgggaatatttaaccacttgtaagtacagatttttttaaaaaaccagtatttataaatcaagtttttggtattaatatttcttaacctttgcttgatgatagactgcctagatcttaaaggcagccagtatgggggtatgttatattcatatgatcctgttttgatgatcagttttttggcagcttctttgatggcagtccactccagttactattgcctggaagacagaggagcttggtaggctacagtccatggggtcacaaagagtcggacttgactgagagacttcactttcacttgattcagcaaatatttgttgagcatatagcatgtgcctggcactgttaggggttgaacagagagatcagaaaaaagttttcaccctcgtggagtttatgttcaagtgagggagacatgcagcatgttcattcacatttatttccagaggtgatttttgtcatattcttttttattttataaatcaaaaacttttggtttgtttcttacagctggtatattagaagtaagagatgatgtcttttttcttctaattgaatctgaaagggaaagactagtcttctctcctgtcctcacatctttttgtgattgtatctggatcataacacagatgatgtgattctgagataggctttgtcacagagaatttaagattaatttcctctttactttttatcttagcccagctgcgtgctgccactaagacccggtgcagccaaataagtaaatgttaaaacatttgttcatgggttaatcagttctgttttttgccctaggcatttcaggaagaagttcaatatttgtctggtttccatcccagaactgctcttcatgctctgcacctttggataccttatatttatgatcatctataagtggctggtttattcagccgaaacctccagaactgctcctagcattctgattgaatttattagcatgtttttattcctggctagtgacacagatggtctttacccagggcaggtaaacaatcttttttttttcttcccccattcttaggaactcaagggaagtcctcatgagagcctttttgtttcgatcagtagagtgattaaaggtgcttcccacggcctccctggcactgagcgactttctgtttctctctgttatcacaagggtgtcattttgccatgagtgctatctccagggctctggtcagactgtaatccaaacttgctgctactccttagctgtcagaagtggtggggaaagaatgtgttactggagggatccatctgtctttccagttttttcttttcttttcttttccagtttttttcttttcaaataattttatttatttatttatatttaaataataccactgagccaccaggggaagcccctccggtttctttaaaatcagtctctaactcagccaggctttcagagaactggcagttggaccgtggcacatggtcctctccagaagtgacttttctatatagatgcacgtttgtgtgatgccacccatatcagctatgagtttaagaaacaaagggtaaagaccctctgacaaatatagtttagcttgcgtttactttatgttccttgctaaaagacattctgcttgattgtcactagtttcagtgtaccaatgacactgttgggacgtctttgtgttttaaccagcttcctccccatctgcaccaacaggagcatatccagaggctgctgctggtcatcacagtgttgtcagtccccgtgcttttcttgggaaaaccactctttctgctgtggctgcacagggggcgcagttgttttggggtcagcagggtaagtgtgagttcggatgcacgtttgttgatggtgagcaaagtctgtttttagctgtggaaagatttgtaaggaaaacaccttccaggaatgccagtggctaagactccatgcttcctctgcagcgggcattggttcaatcccatcggggaactaaggtcctgcttgctgtgcagtgtagtcaaagaaagaaggaaatagatttggaaaaaaacagaacaccttccatggggtccaggctttgatttaaaagctaaagcttccctcactgagcactctggggttggctgttctgcagaggtgtggtgccaggaacctgcacatctgggcatgggaaactggtccccctttaatgaaccccaaacttaacaggagcttgcactgaaatctttcagtgatgctggtcataactagagtgttcctcgtccttattcttgcttcttcattttttaaagtgctttttaaatttaagtaacataattaaaggaaatgtgggaaatacagaaaatagtgccttgaagttttcctatacagttataaacagtgttaaccatttgttgagtttcttttcagagtgttttcttgtttgtctgtatttctttttttaaaaaattctggtgctggggtgggggaaatattgtggtaaaatacatgtgatgtaaattttccatcctcaccggttttaggtgcacagttcagtgtacacctaaagtacacactggcactaagtatttcacactgtgcatacagcctcccacccgtctccagaactcttcatcttcctaaactgagacttcatatccattaacactaactccacatttcctcttgtcccagcccttggcaactatccttctactttatgtgtgtatgaatttgactgctttaggtatctcatacaagtggaatcaggtaatattctccttctattttagcataatgtcctcaagattgatccatgttgtaacctgtgtctgaatttccttcctgggaattccctggcggtccaccagctgggactctgtgctcactgttgagacttgcctgggtacaatccctggatgaggaactgagatcccacaagctatgtggtgccaaaaataaaaaaagaagagaaagaatttccttcctttttttttttttttttttccactttttgactgcactccatagtatgtgggatctttgttccctgaccagggattgaacctgtaccccttccattggaagatggagtcttaaccaccagactactacggaggacccttccttcctttttaaggctgaataatattccattgtgtggatagactacattttgcttctcagttcatccacgaatgggcacttgggttgttttcaccttttagctgctgtgaacaatgctgctctgaatgtgggtataaaaatatccattggagtctttagcttttagttcttttgggtatatcctagaaatgatcgttctttgtttaatgttctggggagccactgaactgttccacagtggctacaccattttacattcccatcagcaatgcacaagagttcttctacaccctaatcaacgcttacgtattttctgtttttttaacaacagccatcctagtgggtataatatgctcattttcttttaaagggctttttattcctgaagaactgagtctttaacagttagagttgaaggggttctaactttgatgttgtcacaaccttgtgattttaaaggcactgactgttttctttgggttgtttttagagtggctacacacttgtaaggaaagatagcgaggaagaagtttctttgctgggaggccaagacatagaagaggggaacaaccaaatggaagatggatgtagagaagtgatgtgtgaagaggtaaccttttcagttactgttgttgatgtgaggagccagacttgcacagagatgattgtcacaacgagagtgataagaatcccctgtttttttaaattaatttttactggagtctagttgacttaccatctgtgctaatttcaggtgtacagcaaagtgatcagttatacatacacataccagttcagttcagttgctcggttttgtctgactctctgcgacctcatggactgcaggacgccaggcttccctgtccatcaccaactcccagagttgctcaaactcatgtccatcgagtcagagatgccatccaacctctcatcctctgttgtccccttttcctcctgccttcaagctttcctagcatcagggtcttttccgatgagtcagctctttgcatcaggtggccaaagtattggagcttcagcttcagcatcagtccttccaatgaatattcgggactgatttcctttaggatggactggtttgatctccttgcagtccaaggactctcaagagtcttctcaaacaccacagttcaaaagcattaattctttggtgctcagccttctttatatgtatccatttagattcttttcccatataggtcatcacagagtactgattagagttccctgtggtatacaggaggtccttattagttgtctgttttgtatatagtagtgtgtatatgtcaatcccaatatcccagtttatcctttcccccactgtcccttggtaaccatacatttattttctctatctgtgactctgtttctattcattgatagtaatcatcttaaacatcaaaattcaaagcaaagcaaccattcctcaaagctttccaaatactattctcttcatagaattgtcatcataaggatttggggttaacattttgtggttctcagtcttacaatgggatttatagcattaacatcacaagttgtgatattaaatgacttaaggtgctatgaacattgctttcagaagattctcatctccatgagaacttctccatagatgtaagaaagagaccctgttcacactggcttcagggggattctgctggctcaggtcaggatgaggggagagggggcctcaggctggcggggctctggattccaatcccagcaagtctagcttgggttttctttgcaagtttgcttcacattctgaagccagctggccccacgatgttgaaactgtagccacagcgagcactgggctcattttcttcagtctttcaatcagagaaaagcactcttaccgtgaggcagaatcctaagaagtgctgtgatctgcctggctggcgtcactcaccatccccaaaccagtgactgctatagttgcctgcatgggctgccacagccacacactcgggggcttgaactgaagaaatttatttctcacggttttggagaccagatgtccaagggcaaggtcttggcagggtcagtttctcctggggcttctctctgtggctgtgtccccactcggccttattgctgtgcctgcatctctgtgttctcttcttataaagacatcagtcctactggatcaggccccaaccttagacctcatttaacacttatcacctccttgaaggccccatctccacacatactcatattggggattagggcttcaacgtatgactcttggaggggacacattttagctaataatgactggctatggatccaaacaccctcttccaacaacacaggagaagactctacacgtggacatcaccagatggtcaacaccgaaatcagactgatgatattctttgcagccaaagatggagaagctctatatagtcaacaaaaacaagaccgggagctgactgtggctcagatcgtgaactccttattgccaaattcaaacttaaattgaagaaagtaggggaaaccactagaccattcaggtatgacctaaatcaaatcccttatgattatacagtcgaagaagtgagaaatagatttaagggattagatctgatagatagagtgcctgatgaactatggaatgaggtttgtgacactgtacaggagacagggatcaagaccatccccaagaaaaagaaatgcaaaaaagcaaaatggctgtctgaggaggccttacaaatagctgtgaaaagaagagaagcaaaaagcaaaggagaaaaggaaagatataagcatctgaatgcagagttccaaagaatagcaaggagagagaagaaagccttcctcagcaatcaatgcaaagaaatagaagaaaacaaccgaatgggaaggactagagatctcttcaagaaaattagagataccaagggaacatttcattcaaagatgggcttgataaaggacagaaatggtatggacctaacagaagcagacgatattaagaagaggtggcaagaatacacagaagaactgtacaaaaaagatcttcacgacctagataatcatgatggtgtaatcactcacctagagccagacatcctggaatgtgaagtcaaacgggccttagaaagtatcactacgaacaaagctagtggaagtgatggaattccagttgagctctttcaaatcctgaaagatgatgccgtgaaagtgctgcactcaatatgccatcaaatttggaaaactcagcagtggccacaggactggaaaaggtcagttttcattcagatcccaaagggcaatgccaaacaatgctcaaactaccatacaattgcactcatctcacacgctagtaaagtaatgctcaaaattctccaagccaggcttcagtaatacgtgaaccgtgaacttccagatgttcatgctagttttagaaaaggcagaggaaccagagatcaaattgccaacatccgctggatcatggaaaaagcaagagagttccagaaaaacatctgtttctgctttattgactatgccaaagcctttgactgtgtggataacaataaactgtggaaaattctcaaagatgggaataccagaccacctaacctgcctcttgagaaatatgtatgcaggtcaggaagcaacagttagaactggacatggaacaacagactggttccaaataggaaaaggagtatgtcaaggctgtatattgtcaccctgcttatttaacttattatatgcagagtacatcatgaggaacgctgggctggaagaagcacaagctggaatcaagattgccgggagaaatatcaataacctcagatatgcagatgacaccacccttatggcagaaagtgaagaagaactaaaaagcctcttgatgaaagtgaaagaggagagtgaaaaagttggcttaaagttcaacattcagaaaacgaagatcatggcatccggtcccatcacttcatggtaaatagatggggaaacagtggaaacagtgtcaggctttatttttttgggctccaaaatcactgctgatggtgactgcagccatgaaattaaaagacacttactccttggaagaaaagttatgaccaacctagatagcatattcaaaagcagagacattactttgccaacaaaggtctgtctagtcaaggctatggtttttccagtggttatatgtggatgtgagagttggactgtgaagaaggctgagtgccgaagaattgatgcttttgaactgtggtgttggagaagacttgagagacccttggactgcaaggagatccaaccagtccattctgaaggagatcagccctgggatttctttggaaggaatggtgctaaagctgaaactccagtactttggccacctcatgcgaagagttgactcattggaaaagactctgatgctgggagggattgggggcaggaggagaaggggacgaccgaggatgagatggctggatggcatcaccaactctatggacctgagtttgagtgaactccaggagttggtgatggacagggaggcctggcgtgctgcgattcatggggtcgtgaagagtcagacacgactgagtgactgaactgaactgagctgaactgatggatccagggtgagatgggagcagaagcgtctcctcccagggaaggcgagcgcagtcctggcggacagaaccagcgtgtctgctgctctcggctgctttattgtcttggaaactctggctgttctgaggactaaacaagatttctttcagttagccttttgtaattattatgtaatttagtgctttaatttgagacaattaataattaactttctaaggtcataaaaaaacaaaaagcagacctggaagaacgtgagaggcgtcttgcccagtgttctagtcttttcactgttagggactctttttataatttcttgttctcagacttatattaagatgctcttatccattaaacacacatacattcacagtattctaatcttgtggttggtggatgcctggttttcatgatacgttttataattactaagagtagctcaagcacctcattgggctgtctgagggccatggcggctgtagcatcagagtccagaattccggtccagcaccctcagctcacctgtggggtcacatcctggggacagggaagtgggagctccgtaaatcgaaaggtgcttagtggcagagccgtgagcagaactcagatcgcgtgactccctgcccctcacgctccagcgcgtcctcagcagcattccagaagccaggcctgtcactgtcctgcatgtcatgtacagactctaacccacgttgtgtcatctctcgtagtttgattttggagaaatattaatgacccaagtaattcattccatcgagtactgtctgggatgcatctctaacactgcttcgtacctgaggctctgggcactcagtttggctcacgcacgtaagtttctggtttgacctgcagttcccaaactctgggccaggccacccctcagcacctcagttaactcatgggggcactgtgggacaccagaaaattttgatggaaagggcactgtctatgatactgtgtgaatggggactgttaggttgtttggacttgactacttactgccctgctctcctgggtatttctcttgacttcagggtgctgtgggaaaattcactgggacacgagttgttttcaggactgagaaggcttaggaacctctggcataagcattttactccctctgctctgaccattatcatttttgtttttactgttattttaattcagccctgccttaccaagtgtgatggtctagttatgtcaagcaagtcctgaagtactgctgatgaatagttttgattacagatagttcttcttttgcatgctctggtgatgcatggatttcagttacctccatttacttaagtctcaccagccgcccaaaaacatggttgaaatttcagtttctacgataaaatctgagtatatgggtacaaagcgcaggctccactgctggccttttagcctacaagtcaccccgtcaataatacagacggcacttcatgagcagagaccagcgacatcactttcagagcctgttgtgattggcccctgtgttttttcatttccttatgcatttataaacaagaataagagagtgttttcatgttttggtaattttgaaaggtcccagaacaactgtccttttccccatcggtccctgaacctgctgctcagttcgtgcccggacagcaaagcgcgtggtggggttggctccttgtgggccagcggtaaactcacctggcatttaaaaatggatcactgaactgagggaattggccaacaaagatgaaaacatgcaccagagaaaaaaacagtgatatgtttgaggtgaaatgcaaatggaatgtgacaggagtttaggagaaagagctgatgtgggggtgtgacactgctgctgttcgagaggtgaaatttgtagccagtggaacttggtaacgcacagaagatgccggtgtcccagacgtgatgccgcagaagctccaggaggtagttcaggacttggaaggcgcagagcacactgtagaagctaatccaaacttggaaaagagtagacagcatgctaggtgttagggagaaggcttgctctgtgtccaggtgcctggctttcccaggtcacgtgagaagaaggctgttcaaatcacccttgataagttcttcttaccaaatcttcccaacaatttagtactcagtgtttctaacatttaaaagatagattcgctctctttttttcatttccttatgcatttataaccaagaaaaagagagtgttttaatgttttgacagtaattttgaaaggtcctggaacaactgtcattttccccgttgaccatgaaggatgctttcgctggtcatgttctgcccctgctccgttgtgcaaagactgtctgtacttgtgaaaatcaccaggtgatagaggtgttctttcgctgggtggtacactgatatttttataagcatagctgcaagttgagacttttctggttggaggggacgctgtggtccaccatcttctactgcagaggaggagactaaggcccagtgaggttcggtgctggcgctggatcaccgcctgatcagttagtggccgagtcaggactgatgcccagcttcccactgcctgatccagggctgcactgggaccgagccagccagacccccatctgggtcaagatctctccttggcaggcaggcagacctctgatttctctggaatgtcaagtcatcctccacatttgagatgatcaagttgctcaagtaatttttatgtgaggagcagattatatcttttacgggtgtgtatttattttagagataacaattcaaaatttctcagaaggaaactcagtctagcttgctaatggaagtgactcactgagggtcagcagaggttaactctgcagaatgcttcccatgcagagttgtccgaggtcctgtgggccatgctgattcacgtcggcctccgggtagacacaacctacggggtcttggtgctgctcccggtgatcgctctctttgcagtattgacaatcttcatccttttgatcatggaagggctttctgcatttcttcatgccatccgcctccactggtgagtttggaattgagcttcagaactgttatttaagacagtaacaccaccccccccaatatatttacacatagaacatttccagtaatatgtgtacatacattatttaggctagttcgttctttcccagtattgagatctgtattctgatcccctgagttaaaattctgttttgtttctgagctattgtccctgacatgtaaaaagcaagtttatacttgatgaataattatgtgtatttaatattttcaactcattttgggtctgacaagttactttatctcattgtaagccatatttcttaatgttttacaatatatatcagattacttgtctgtgtgtgcagttacgaggagagagaggttcctaattctcttgtgaatgtccatagagtgggaggtaacatgaggtgtcagcatttccttcatgagaaagccaacaaagggtcagtgtgtgtgtgtgttttacctcagtaaaagtatttgtgccaaaagcatatatggaatgaagcacgtttggaagtataggaacttttttttaacttagtaaatgttgttttaagaaatgtaggaaatgttattcagaatctttcattaatactttttttttttttagggtagaatttcagaacaaattctacgttggtgcaggcaccaaatttgttcctttctcattcagattactttcttcaaagttcagtgatgacctggcgtgatcatattgagtagccaacaagctttcagatttatggagaattatcatgttgtagaattccttatgttaaattgatgacaggaaaaattccatcttcatcaattgccttatgagatagccaaatctgtaagatatacctcttcctcatatcttaagtattttgtaaactttctcaatttcagatatataaatttctttcagtttttatgatgagcaaatgtaagttcatgcaaaagttatgttatggttgtttttaaaaatacaggcgtgggagagagaagccaattttgaatggcaaattgaaaatagtcttagatatttgattccttttcattttattaaaaagaagaaaaaagccagagttattctgtcacctgaagttgtcagataatattttccaacagctgaagctaagtagtttaaaaaaaatttaatgacggataatcaaaagattcacatttattatattttgtttaattaaaagtatgcaaactttttca

SEQ ID NO: 224 - DNA, 57293 bp, Hippotragus leucophaeus
  source 1..57293: mol_type = genomic DNA
atttccttctccaatgcatagttttctatatagatacatatgctaaacctcattcaatctttgtattcaccacaaggcctagcagagtctctggcacttttttttttttaattaacgaataacttagctgcatatataacacaccagactaaagcagggataaactcaaacagaccccacggtttacttttttattttggagtgggggcagactggaggtagatagttatgactgctagactacagccttgctccacccgaccccgccctgtttgacgtcacaatccggagctggaactaccattcccagaatgccgtgcgaatgggccggctctctggaagacgccgagtgattggcgggaggaggcgtttccttccggcgtttccccggaccgggaggcgtggactaggagaggcgttcggacgctattaccgggttgggcgggccgggctggggaggggtttgggggtgagccctgagtcccccgcccgctgaggagatggatgaggatgggcttcctctcatgggctcaggcatagacctgactaaggtttgtaaagatggagttggatttcggcgacctgggaggaggatggggaagggacgctgggttcccagaaagaccccacctctctgcccaaccctggcctgtgcgtgtcttccccctctcttgggagggagggttccacagtttaccttaaaaaggggtccttcccgagccttctaaggtggggcgggagtggtatgcctctcctctccttcccttcccgagtcacgagttcttatgttcaagggcaagaactcttacctgttccgacctctaaaccgaccttttttataatttggcccttcagtttttcgtgtgtttgtgtgtgttgcctttacctgcgaaagttcacatctgtgaatccagaacccgttctcaaactttgcagcctctgtcattttggacaccccacccccacagtttaggaaaacaagttaatgactattcgcagtacttccagtaactgtatcacacaggagaacgcctccttattattaatatcaaggtgatttcgtgctgtacgtttcgtcctgtacggatcatgtttatttttacgtaaaacaggtgccagctattcaacagaaaagaacggtggcttttctaaaccagtttgtggtacacactgtacagttcctcaaccgcttttctacagtttgtgaggaggtaggtcctttgatactggttgaatgagtggcccaatgtcaccttgcactttagaaggtaacaaatgagtaaagtaagaattatggtgtatgcaattatgtactatgacctcttgtcccccagttattgtgttgacatagcttaaatcctctgattctattaccgtcagttcctacagcccatctctgctgaatgaactttctggaggctttgtgaaatagttcagtaaggtttattgtgattaaacaacaaaagcagttccaagatttcacaaaaactttttttttttttaatttttgaagttggttatgtttctcttaccctaaggattgcattttaaatgtatactgtttcagtttctattaaaattatgttacattacttcatggaaaggatgattggggaggtagcctagaaacataacttgggcatcaaatatcatgatagaagtaaaaatactttctgcaaatgagttgtgaattaaggatcaagtaacccaatgacccaggtggcacagtggtaaaagagtctgtctgccagtggaggagacatgggcttgatacctgggtagggaagatcccctggactaggaaatggcaacccactccagtattcttgcctgggaaatcccgtggatagaggagcctggtgggccacagttcatggggtcgcaaagggtcggaaacaacagcatgcacatacaacccagtgacaggttaggtaccatatccagggacacctgtcttaacaaaaaactaaaagagagtgggaaggaaatgggaagcatgacttgaaattggtttgaagaaaggagaaaaagaggacaaggaagtgggacagtcatctaaaaccaaaaggtgttcttgctcagttttctttactacttgaggatcatgttaaaccttagggctccactttggggtcatgaactacctgagtgctgaaattactgttcatcatttgagtatcccccccgatccagtccttgaatgagactgttcatagagggatggttgctgcctaaaaagtgtaggaatatagatgtccttgggccccttattctgtgttaagaataggatacacttatatacactttaatatattaaaatcattgtgctcagtccataggctagagaaaattcccacacagatatgacagtatttctccataagcttgccaattctactttacaaaagttcagtgaccgcttaaaattaaataccccttcagtggggaatccccgatggctcagctgaatctgccagcagtgcaggagacgggagacgcaggtttgatccctaggtggggaagatcccctggaggaagaaaatagcaacccactccagcattcttgcccagaatatctcacggacagaggagcctgatgggctacagtccacagggtcaaagagtcaggtctctgagagttgagcctcaaagaattggacacaactgagcacacatacagataaaatataacaaaaactgtcttgttgattgcttatcgattatcaaagcctcacgattcattctttcctcccttctgttcctctctcaactacccccctccaactgttttgactatatcactatttcctacttcttccttgaaccccagaagaaactttgtggacaaaaattcatgaaatttaaaagtagctaattgcctttttctccttaatggatggtaatttaggattgactgtcactcatttagaattcagcttgtggcattcatcttggatgtttatgtcaattgtagactttttacttggtgtgatgacagtaatattcattgtgtacttattctgtgctaggcattgtgctaagtgctttatgtgtacttaattatcacagcccagacctttaagaaaggtgcaattatctcttttttagaaatacagaaactgagatgtagaaaggcttaaatcatttacttagtcatttattcatgcactcatcgtatatttgagggcatagtatttatagctgcagtagctacttgcctacattcaaacagctagaaagtaagagctgggattccaattctgatctgttacctggtttcaatcttctgttctgttgcaccatctgattgaataagaggcatgtttatatcattttcaagtgagagattgcactgtcttctttatagctatttcaaaatttagtttttagatttgtgttctcttctttaccatgccatttctatttaatataatgtcttttatatgataaactccagggatataatatacatattcatatatatgaagggccattttctcccaagttaagatcagtttccaaactgggttgttatttgtttatagcagctattaaacctgtggtctttgtttagttaaagccttaaacaaggaccaaaaccacgctgtttccctcaaaaaaaaaaaaaatttgaacttcagctgttactttttgaacttgaagtgaactggagggaaaagaaaacctggtgggttttggtttgtttgggtttttttgtgaggggagaggatattggggaggtttttgttttaactttttcacttaatctgctttgaaccaaacccaaacagtatcttcagtcacagctaaactcaaatgaaaattaaatttgaaatcaataggggtctttcttcatcactaatactggttttagaatttttgataaagagaaaagtgaagaagttagcttttaaaaaactttctggatactgaactactttgtaactcttctaatgactagaaccaggataggagaaaagttagaagatggagaaaggaaagttagttgaatctgacccaagttacagagttactcagggtccgtctcctcttccctcacaagtctccagtaagcatttctattctggtcctaatcatcaaaatcttgtggcagtccactgggagagggattgcgaattttaaataggaagtacgtggagaacagcgcaagttctgcgcatagcacagataagactgagtggaagtttaaccttattgtaaattttaaagttaaaggtattcagcaaacagggcaatcaggtgtatttgactcagacttgtaacatgcctagaatgctgggattttagtcatttctaaatattctaaaacatttctttttaaaaaaaaaaaaaaaaaaactttaaatacaagcaaaagctcttagaattttcacatgacctaaaaaaaaatttagtgcttatcttctgtgtccaatttttaggcccaccatcagacttcaccttaaaccaaataaggttttgctgaaaaccctatttactgctataacttttacaactgcttttaaaacttttacaactgctggatttaagtgtcagatgaagcttagtaaaaccatcagttgcttccctctctggcttctaggacataactcaacccaaaatgactaattgtttctcttttaaagaaccggatctgcaaatgggatattttacaaacctgaagtcccacagtgctttttttcccatgttcaacttttagctacatatttcttcctcttttttttttttttttttcacttgagtaaaatgcactgccttgcaaataggtgggtggtgcatcaagaactcttcaactttatctgaaaaactaggaaccttgtaaattcccctgttgtcccaactcaagatatttcaggtttgctttaaatacttataaagaggatggatggttaaatggatgggaaagtagacatacctttctgtttcctctctgctgaaactttcaaaggtggggacaattactgttattgatcatgttacttatatccatagtcatctacacttgagaagtagtggttctcaaccagggaacatttggcaatgtctagaaacatttttcgttgttgcagttggggaatttttgtggcaattagtgggtagaggtcagagattctgctaactatcctatggtgcacaggatagacctttacaacaaagaattatccagcccaaaatagagccagtcagtagagctcagtcaatagagccaagactgagaaacctgctttctggtggtctaggagtttagaaggaaaatgcagatgacataaacatcatagaaatgcgctttagcagcccataaatgaaaccaggtgtattttgtcaagtgacagtggcattttagaaagtacatatttgtgtgtgttataacagtaattacatgggaacagactgaaaaacatttattatgctgaataatctttgaaaagcagaggttcttaattttgccatggatcctttggcagtctagtgaaatgaaattaatgtttttaaatgcataaaataaaacatgtgggattataaatgatataaagcgcataatttaaaatggagaaggacatggcaacccactccagtattcttgcccggagaatcccacagacagaggagcctagcaggttacagtccatggggtcgcaaatagacatgactgagcgactaacacacaacacatatatatggctaatttaatggtacagaataactagagcatggtaagctcttgcttctggtttatcttgggttttaatggttggttgattcctttgcttttttagtattcttatttttttttctttgttttaattcttcccgacattaactacttatcttccaatttcatcttttcttttcaaacttggaaagtttgaattcaggattaattgtatatatttctgtgtttaagtgatacacaaaggcagaccctgctcctttctgtttggggctagtttttaatcctgtgttctatgaagaattccttcattcagcaacaagtaattatcaggctcctgttaagtgtcaagtactgctctggtcacaagggatattaacagtgaataaaaaactctgtcttcagaggagttcacattctggtcccagtgattgattatggctctgataatgagtttcataagactgaaactgtaacagcttctctatgaatacagttttataaaataaccatgaaacatcttaataaagataattgaatacttgagtttgagttcttactcttgtaaataagagagtagtatattagaaaatcacaaatattttaaccatagtttttaactttatccttttgtttctactctttctttttcagaaactagcagacctttctcttcgaatccagcaaattgaaacaactctcaatattttagatgcaaaggtttgtatttctgaataatttataggataaacttgctctacatatatcaactttctcagttgcatttaactttaattgtatttaggaatgaattcaacttagctcctgcatccatgatgtggtgcagtgctttcatttgtttaatttattataattgcaaaggaaataatcttcattatgaaccactaactaagtctgtttaaatatacacgtgggtcaagatttctttcattatttaatcaaaaacataatgagtaacgttaacaaattgaatgttatatagtttgcttcatttaatggaaaactcacaattatcttaataatagtcattgataacacaggaaacaattctgtaaaactttacatgtctccagaacaaaatttggagaaaatctcagctgttttccatttgtaaatatattaaatgctagtgagtagtaccagttctgatgtcagaaatcacaaaaggtaactgtcatataaaagcaaaaatagaaggttgtttcagtttgaaagcttgcaggttttgtgtgcttttcttgtatataaaataatggagatgctaatatatttttgtgactttgttcttttatcaaaaaaaattgacctgaaaaaatatttattgactatttataatccatgggcttgccaagagttggacacgactgagtgactgaactgaactgaaggaagtgaaatcttctagcttagggatcagaatgtctggtttatgctttctatatcttcctatggtcttcagctactgtatttccctcagaacatttctttagcttgtaatttaggatatttggccttgaacatgttcaaaatagtttcttagcagccatacctacttgaaactattagggccatagacactgtgctaaatactgtcatcagtcaacagttttcaatgaatattgctgctttagatcttattgccattgttttttcattattctttattatgaatatgtatattattttaatgtttgtggaattcttaagttagagtccacggtcacaagttaagttgccatgtggacaggttaaccttaattatttccatgaccacagagttaatcctcaaagttagccaaacatttgacagatgtgtgtcactgatatcaggatgaaatcagaaaagaatgtttgcatggatcttggaaatccaacttaaaatgcttaaccactgacatcatgctcattttttatgtatggaaactaacacattgtagtaacatgaagtgatattactaaagaaagaagaaaagaataagctgcatcatatgttaacatgcgtcaagagttttctcatttcccagattattcaaacttaaaatgggctacagagcacattttgaaggggaacaaaatatatttaatcaaaatctttttacaaatttgggatgtaagttttctcatcccccactttacaggtgggaaaattgaggcctaggaagatttgcacagggttacatatgttgtcagagaaagcaatggcaccccactccagtactcttgcctggaaaatcccatggacggaggagcctggtaggctgcagtccatggggttgccaagagtcgggcatgactgagcgacttcactttcactttttactttcatgcattggagaaggaaatggcaacccactccagtattcttgcctggagaatcccagggacggggaagcctggtgggctgccatctatggggtcgcacagagtcggacatgactgaagcgacttatcagtagcagcagcaacatatgttgtgacttaaacctcggcaatctgactccaaagcccatgctctcattccttacactaggattccttattaaaaatataattcctgagaaagaatggtgacaacctaaattagattagtgagaaattcttcaaaaattttttatttgtcaatccctttcacttttaagtagtttatggcatggagaatttcaaccaaagatgagattttatgaaaccacttctatagctttaaaacttaagaaaactatttgaaacacaacacatacttagacacttattctttaaagatctaatattatcctcatataccaacattaattttctcctctcagttagcatctatcccgggcctagatgatgtcacatttgaagtatctcctgtaaatgtcagtaggatcacaaatggaacacattctgaagccacttcagagcaatcacaggtatgtaattaagttccaggaagcatgagcacctcttcttgggtgaaccagatagaccaaatctgcaggttcaaataaagaagttaaataaaaatgtagcacttgactagtaatattttaaactttaagataaaaaatacagtttgaaaaaagttactagcttttcattttgttattctgaacagtttcctgaagttaatatttttcctgcctataaaacagaaaattgacctataaaggactaggaataatcttaaatataactactttcttcaagttcactctggaaattttcttcttggttcttgtaagaaatgtgtcttttaaatgttttagtatgacattttcacacatgaataaaaatagaatagttcaatgactaaccaagtgcccattacctggattcaccagttgagattttgttgcaattgcttcatctatctttttttgtcactgaagtaaattccaggcatcatgtcttttcacccgtgtataattccctgagcatctgtgaaaagttctgacatttttttgtataaccacaatgcctttatcatatacaatataatgagcaataattccctgataatatctaactctttgttaccaaaactctgctccatgggccagcaacctacctgagaacttgttagaaatacagaatctcaggttccaccccagacccactgaatcagaattttcattttaacaatatccatatgtgatttgaaggctcttgaaatttgagaggtcctaatctaagaaacaccacttgtctaaaaaagtgtgtttggggagttgatttgttcaaatcagcatccttgtaaggcctgaactctatgtttggctcttatgttttaatgttcatttatgctctgtaaaaatttaaattgtgtattactttttatttcaagaaataaaaattcttcattgtttaagaataatcgctagtatatctcagtgaggtattaaaatccaaaataagaaaatcactaaaatggtggtctaacaagtaataccaaacaaacagacttcctgtgtatatggaattttgcatttgtacctggaagtactttttatgggatatcttttagatcattatgatgttatgtaaaggtttctgactatgtgtggtgtgttaagtgctttttataaattaactcatttaattctcacaacagccctatgaagtaaatacttttatcagttctattaatactttacaggtatgtcaaatgaggtacacagaggttaacttgttgaaggccagacaataaatgtaagaactagaatttttacccaaacaatctggtgtcaagaatcctatctcttatctcctacactgcactgtctctagcacctgtgttgaattcataaaacataactcactccagtattcttgcatggaaaatttcatggacagaggagtctggcgggctatagttcatgggattacaaaaagtctgccacgactgagcaactgagcacgtgtggtccaagggaggagtgggaggaggtataatttagaaatctctgtgtgggaggagctataatttagaaatattgtatatttggtggatgaattagatgactgtttacttaacagttagggcttccctgatagctcagttgtaaagaatccacctgcaatgcaggagaccccggtttgattcctgggttgggaggatctcctggagatgggaaaggctacccactccagtattctggcctagagatttccatggacttctctggcctagagaggtctatggggttgcaaagagtcagacatgactgaatgacttttgcttcacttcgctttacttaacaattaggtattagaaaatttaacatccatttaattaatataacaaattccattgtgatgatcactggaatatatataatatacaaaaataaattcaaatgtttagaggagtttaactttacaaggttttatcaattgaagataaaccatcctttttctaaaagaaggcgtatgtaaaaactattacatgtttccattctacctagtagttattctttggtggatactagccattattatatttctataaatttataaaatgatatctgactttcagtattaacttttccgggtgttactgtgcacgcccatatataatacgtatttaaaacttgtacagttgtgttggtcttgcctatttaaagtctcaaaaaattgattataagtaatcacaactgaattatctaaaattcagaattacttgatattctggcaattttattgaaaaatagttattaattcattggaggatttatgaagtactgttggcttcctgaatttaaaaaatatggtaaagttgtgtattgattggcttaatataaccattcagcatgttcttaatattgaaatcaactctttatttctctccattgtttttaattggtatatttatgtaaaatattttgaaatggactgaagtattgcttaacacagaatttccattgacattacagtcaacttgcttatcagttaaaagataatcatgaacttttttttaaatcatccattcattgcaatctccaatctatatatgagtcaaagacccaaggtttgcatactgatttttctgcacctttaatttcatggttcagatcttatcattactcacagtagaacatctaattgtacagattgagattaatttcagaataaaatgaaggacagttgagagatatgatagaagatttaatgggtcatacaaatagcaaaggtgtaagacctgatataattaaaccttgttgaggtcttggttattaggctgaagttaaaggctgagttttaaaatccagtggtcttatatgtaattaccatttgctccattgtgctattgtatgagtttattgtccttatttttttaaaagcgtacatgggtcttgttgaaattttttgtttaattaagtgttttggacgttttgtaattaatgtattttgcagatggatgtgtatatgtatatacatatttatacacacacacatatatatgtatttttgtacacttgacactgtcatataactggagtaacctaaagaatttggggatatcttacttgcttcggcatttaaaagagatttaatctatatttgaattatctggggaaaaaccttaacatataatttatattctaataactatgaatactgaaagatttttttttatttatttatacttcaacagagatatgcagacataaaattgatatcattcagttaaggaactacccttaatgctaacatacagtaagtcactaagtggacttactataaatgtttaagttgatagaaaaatcaagactatatacagacagtcttggctttgcacttaaatgaagataggattccagtttggacgagttaccatttacatggtaccatgcaaagttgagaactgcctatatgatgaaaccatttttatccaaaaagactatcccccattatcattcattataagtagtatttatactcttaaccactctttgaagaatactaataattctatcagtagctgaaatatatataaacataattttgtttgagaaatgagcttctcttccacaaattctccaggccttgcctttagagatgttagaatagccatatccacttagaacaagattattcaatgaatgagaagtataattgtgtagatggtatagatacctaattgacaaatcaaatagctttactagctttattaaaagttttattaaaataataggtccatcaataattcatgttttgtatccatacttgagggacaagtaaagcagaattttaatttttaatgccttgaatatgtttgcacttttgtagaaacaatatagtgttgacattacatgtaactttctctgcaatcttatttaagtatttgtaaatatttggaaacatatatcctgtaattaaattattggtatttaaatttagaatatgatttttttctgatattgtttgctttagaataataaaaagaaacatcccttttaagtaacatgatggaccccttttgtgaattgtctaaagatttatacaccatgctctctacagcagaacagtttacaagactctggaccacaggaaagtgaagtaacaccagaaaatatcttaactgtagccaaggatccaagatatgccagatatctcaaaatggttcaagtggtaagctgatttggtctatcttctctgtcttgcagcctcctttgaaattcttaaccctggaggtttcattgttattttttcaatctgagaaaactgctaaaccaagtgaccaagttttctatcctcttctttcctatgtttaatgaatgccctgataaagagtaagcaaaagtcaaatctttctaatgaaaactgatctcacacttcaaattagtatagtttgatatacatttatgtaaactttttgcctttcataatctttgcaaatcttggatgtatcagaagaatgaaagtgaattattcacttagtacatcacatagcttaatttcctatattctaatacatgggtttttgtgtatttttattctgaatttcacctatcaatagtttggttcacagaaaagagcataagttacttggcatataaagtaatgcttttaatattatgacttgagaatgggtaatttttctaagaaatcatcattacatggtatgatgcaaaaaaatataacacaatatttgctgttttgtaacagcagaagttagtttcttttcattcctgtagaaagtcctattacagtagtggaaggagctaactgtcctttttcagttgatcaaaaaattaatgcttttgtaaaattttattatcaggcacaagaagtatactaacattaaataagaacagttttgctgaccttggcattatcaccaaaataatttaaaaacaaagaccatctgacaaccagaaagagtagattggcttatttagaagctacagcagtgacaatggagagaagaaagtacattcactttttctaactgtcagaagaaatggctttgtcactttgaaaattcttcattggcagtcaaaactctgggttttaggctttgaagagaaaaaaacagactttggagtgaaaatatataaattttttaaactaataaagataaaatggcactagtttgagtgtgaatcatgatgaatgaatttttaaaactagaactgatgaaagcttaagctaagcttaaaatatgaactgttaaaaactatgtctttgactctttcaaacaaaagaaaactcaaaagttttagagtaactctgaaaggctttttatttagtctcttcttgcctaactgatataattaggaaatagtaaaatctgctttgtatctgtaagactacctcgaaatatttaataaaagacccaatcttagggtaactgttatattcttaaaacattgcctcagattttacaagaacttgaaaaactctcaatctcctttttcaatgtaaattcattgtccatttattccacaaatatttattaaacacttgttctaaagtaccatattaagtattgtctagatttatttagccagctaaggtttccagacaccactagacgtttttatttttgttattaattacttagacaagtttcactgcttttcagaatctcatatataacatatatgtttgtatgtatatctgtaaatggattctttacatattcattcttctaatcatatagcttatcatctcactaggaataacagccaaagtccttcacaggcctgtgagatcttgtacaattcagctcccttattacctttttaatctctttgtcttcactcactgtgctccagctctacgggcctccttggtgttccttaaataaatcaatggacagttgccttactcagggcctttgcatctgttctctctccctgaaacacttttcccaaatatctttaacattttttccttttcttacttcaaatatttgcagcaatattaccttctttctggtcccactcccttgactcctttccaactgtatttttcttcatatgaccattcaattatatgcaaaatactacatattttacatacattattggtatctctcctgcttctagaatataaactccacaagggtggggaattttttgtttactttagtattcccagatcctagaaccataccaggcacataggaaacacctatgaatgaaaatgaaatgccagtttaacctttgataggttttggtgatagattactttttttacactagctcagtggtcttcagagtaggaaactttctggatacaggttgctagttcccacccattaaatgagaatctctgcagttgggacttggagccagagcatacgtgttttggaaaatgctcttctgattaagaactgtttacaaatattttacactgttttataacatcattcaagtaatttttatctgaaaacatttaagaagcaatacattgttgtttttcttatttttaaaactatttccttattttttaaactattttataaaaatatagttttttaaactatcttattctatagtggtacctggctcttagctcaagcccatcctttttgtttggtgtggccatgagcaggagtttaatttcttctgcctcagtgtttttgctgtttttaacccaacattcttgattttagtcctctgcctcctcctgcctttggtacgggtgtttctaattcctaaatatttccagggttctggaagtgctgcttctttgtggtatcctcctcttcaggcacatggacttggccttcctttgctctgctaagtcatcattcttttatctgcttttaatttccatttattgtggttcatggatgcctcatagtcattaaaattggagttcatgttatttcttttttgccttagtatttgggggtaataattttcaagaggaaagcagggaccaacatctttgctttgaaattataagttcatccaagttaaattgaattttattgtttttagttcattgtgccaacctgtatcccagaaccttattacccaacttttgtatcctattgctccctgtcctacatttcattcttcagacaaaaccacaaaactttctcaatataagctccatgctttttcacctctgaatctcgatcctcctcttgatcactacctgttcaaattctactcatctgacacgtttctatgaacactttaactaaattacctaggatcctgaacccactgacatataaagccagaggtgatgtctcccttcatttatctgttcaaccactttatctgtatttttttaatcacttcatatcttgttccttgataatttaaaaatatttttatctactgtattgaaaagaaaatcatgagcaaaagacctatgccttaaccaatctttatattcactttaacaccttgcttataaggttgctcaatcaatatctgttcttttgttgttgttcttttttgtttttgtttgaccacactgagtggcatgtgcaatcatactaccctagtcagggatcaagccaccacctcctgaagtggaagtgtggagtcttaaccactggaccaccagggaagtcccagtatttgttgaatgtactattttaccctgcatattaactctttcccaatttgtatccgctgaaagtgtataaatgtcctattttttcaagttattgatttaaaatattttatagacccaaaccaaaaatagaccctcaaggttgatgtgaacttgctgatcattactcttcagatgacagttactaagctatctataaatccgctatttttcctgtctcctaagaatatcatgagtgaccttcaaaacatccaattgcagatgtagcaacttgtttgacagagcccagaattgtcttccattggcatggtcactctagatttcttctcacttctgcatcatcattcagttctggctttttgtttaaacttaagtatgaaatcattaaatcagttcctttcattgcttcctttgttgaaggatgcaggagaaggcaatggcaacccactccagtactcttgcccggcaaatcccatggacggaggagcctggtgggctgcagtccacggggtcgctaagagttgggcatgactgagcatcttcactttcacttttcactttcctgcattggagaaggaaatggcaacccactccagtattcttgcctggagaatcccagggacagaggagcctagagggctgccatctatggggtcgcacagagttggacacaactgaagtgacttagcagcagcagcagcagttttcaacagggtaacttaggaaggagtctgtcagatgctctgatttgaatgaaattaaagctgccggtacatataaagagctaatgtcacctgcccatcatggttgtattttatccttgtgtttgtttgcaacctgtttcaggaaaacttgacctaaatcctccatctgatcagccgaccaaaaagtacgtcccctctggtaatacagcctttaccttcttttaacttagcttgatgattcctttgtcccatgttcaagaatctccatgtagtttatatgaattggtttaaaggtattttggtttaaaagtatcttctgccttccattatataacattgtaacatactcctttcaaatgtcagttgccattcatgaattccttcccactaatgttagtccctgaaatttacttactttgaaatttcaagtttgctatgtacaaatacacacacacacttttttttaggtggttggatttgttttctatttgtttatatcttttaacttgatagttcttctactttatttttctctcctatgatgttgtgattgtttgtagtctccgagttttagttgaggaattttcttatcctttgatttcagtttaaagccccttgatcatacctgtgggtcttgctaagcataattttggttcttctaaattacataacacttttccaggagtataatcattccagtgtcataagtcatcccctaaaatatgattcagcaacatgtgcatagctagttgtgtttcctttatcattgtctttacaaaactatagctttaaagtacagtaccaccctcctttagaaaatacctcacacaagtggagaagagtcgttagagaccttttgcaatctgtggcattaaatccttcagtttctgtcattagcatgggaataatctagatagctttgtatctctgtactccaagatagtaaattaccaaaaaaaaaaaaaaagatagtaaattacctgcctattctaaacagttgtttattcttccaagatgattcagttccttgacagtgactgagaggcaaggaatataagaaagaaaaataaatttgatgtcagagcctaaccccagctaattctagagggtagctttattagaaattatcttatcaatactagaaaatgattcactttcccaacaaggttgtagattttcattaaaatgcccatttttttctcagtttctgagagtaagattttcttgcttacccacttactaaaaatttagttattaacatagagaaagaccatatcagcataattcatcaaatgagttttactttgtcttattgttatgatcttaagtgagaaggaaatggcaacccactgcagtactcttgcctggagaatcccatggagggaggagcctggtaggctatagtccacggggttgcaaagagtcggacacgactgagcaacttcactatgatcttaagtagtttgtcactcaccataaacattactacatgttatcaaagctgaattttagaagcctgcattatagaatttaaggaattgtttgcacaaaaaaaggaaagagagcatggtctgcagaaaatctgtctttctgaaagaaatctctatataccaacagtaaaaataaatctactcctaagatccccaaaataaccattctgtactcaaaagggagttaacagctgcaggacactaatatgagggcagtaatatgatttctctcgtttttaatttctttatatttttgtcatttaaaatttgagttgctgctccataagcaatgtcatttttttgtgaattaattaatttattttaattggaggctaattactccacaatatgtagtggtttttgccatacattcacatgaatcagtcatgggtatacatgtgtcccccatcctaaacctccctcccacatccacccccatcccatccctcagggtcttcccagtgcaccaaccctgaatgccctgtctaatggatcgaacctggattggcgatctatttcacatgtggtaatatacatgtttcagtgctattctctcaaatcatcccacctttaccttctcccacagagtccaacagtctattctttacatctctgtctcttttgctgtctcgcatgtagggtcatcgttaccatctttctaaattccatatatatgcgttaatatactgtattggtgtttttctttctgacttaacttcactctgtataacaggctccagtttcatccacctcattagaactgattcaaatgcatcctttttaatagttgagtaatattccattgtgtatatgtaccacagctttcttatccattcatctgctgatggacatctaggttgcttccatgtcctggctattgtaaacaatgctgcgatgaacattgacgtacacgtgtctctttcaattctggtttccttggtgtgtatgcccagcagtgggattgctggggcatatggcagttctatttccagttttttaaggaatctccacactgttctccatagtggctatactagtttgcattcccagcaacagtgtaagagggttcccttttctctgcaccctctccagcatttattgtttgtagcctttttgatcacagacattctgaccagagtgagatgatagctcactgtggttttgatttgcatttctctcataatgagagatgttgagcatcttttcatatgtttgttagccatctgtatgtcttctttggaggaatgtctgtttagttctttggcccattttttgattgggttgtttatttttctggaattgagctgcatgagctgcttgtataattttgagattaattctttgtcagttgcttcatttgctgttattttctcccattttgaaggctgtctttacacctttcttatagttttctttgttgtgcaaaagcttttaagtttaattaggtcccatttgtttatttttgcttttatttccattactctgggaggtgggtcatagagaatcctgctgtgatttatgtcggagagtgttttgcctgttttcctcaaggagttttatagtttctgatcttatgtttagatctttattgagtttatttttgtgtatggtgttagaaagtgttctagtttcattcttttacaagtggttgaccagttttcccagcaccacttgttgaagagattgtcttatctccattgtatataagcagtgtcttatacctgtaatcccgcatatactgtttctcatctttttccaaaatcttaatgcttactaggccctcaaccctcttgtaatctttgcttttccttccttcctgaattattacttagaaccatgtcattctctctcagaagacagtgactgtgtttctcaagctcttttagtttctccatttgtatagaagtttgaattttctgacttccaatgtagtgatcacttgaaagacacagaaaatcctataacttacaaacacaaactttaaaaaaaaaaatttcaggctttctgggtatcaggatggactgcaatcttttctggctttctttgtaagctaccctgaaaacttcctcttcccgcgtcctagatgtctcctggagtgtgctgcttttatattaatattggccttgcttctcttgtcatgtccctgtaaatccactttagagatgaggtaattaaaactgcttaattgatataaactgctttaaacagaagccaacaaagttttttaaaaatcacaagtaccaatgcacagggaaataaaccgtaccttgctttttagtagtctcatttgttttttctttcacccctggattactaccttctgtgagatacaggaatgactacagttccaggaaccagttacctctgagaccattcaggtgcctctgaggacacccagatctttaccctgtacttctggatgcatcatgctatactttcttagctttgtcactcaatcccatgtgaccatattctgaccatattgcctcttaagttctcagtcccttcattcataaaacgatatctaaagttctttctagatttttgacccattaattgatctccaaattggatctcattattaacgaatgttcctggaacacctgctggctttgtctgatttttttttccttttaaagcaagttttgcacaagatttttcagtgagtaatactgttgtgttccacatgtggcagataattgattctgatttaacgtttgttgtcataatagtgcagcacacgtctttactaaattacatattgcatttataacttaactggaattgtgtgcctagatcacttttccaacaattcccccttttttactggcagaccttggtgaatactttgccagtaataaattgttcattgggaaaatccgacttccacattaagaagctaatgacttgtattttttgaaaccatatttgccaaaacagtctcttcggacacttagttggttttttttttttttttttaagctctgttttctttggctggatttaaatgtgaattgaatgatctccttggttctggtggttctgatgcatctgttgccagcctggatgttggcctgaggaaatgtgacttccattacctaaggaaagcatctccaactgattcttaaaatgtgcatcaagaaattatacaccttggacctggggaaactaatcaagcataaagtagaatactttttaggtaaggcataggtttttaagattggttcagggctttaaaacctcctttgtgatatgacctccatgtgacttatcatggtgtagagagttccaggataggtttctcatcactgattaacaatatagtcaaaaggaggagctgctggttcatatgtagtcaaaggtatggaaaacactattgcagatgtagttttaacaactctatgtcacttttaaaaaacttttaattctgtaggtgttttaatatgtgttttgtttcctttacaatagctaaagtttactgatcagtatcaaggtcaatattttttcattacataaaggtttaggggcagacagttttctctggtgttttagtatcacactattcattgaaggtaaaagctggcatggacagtgactgattacccacacatatgaatgtagataaagaaaagataaaagtgaacatatttgtctgtttaattgtgtaatttagccaactttgaaaatggaaaagggaaaatatttttccttcccagttccatttccatttgactataactttctttccatttgaaagaagcaaagcttagcagaatgataaaccacatgagtagttactttgagttgacataagtggaactcagggctttctaggtggtgcagtggtaaagaatccacctgccagtgcaggagacagttcgatccctgggtcaggaagatcccctggagaaggaaatggcaccccactccagtattcttgcctgggaaatcacagggacagaggagccagatggactatagtccatggggtctataggcaaagattcggacacaactgagcactgagcgcacacagtggaactcagtggccacagttatcctgtttcctctacattctgtctttcatctaacaaaagaaagattggataaaggtttttcctaagctaatgtgacaattagctgccaatggagagcccctgaggtaacaacccatgctttgccatggcctaagtaattagaaaacctagaaacaggtactttttgttgtatttggcaaagaaaaaaaaaaagcactactgaaattacttattctctgctaaagtcagtgaaccagcctctaaggaaaccacatgtaaagaattatcatgccagttttccagattatgatttttcaatattttagctgtcttttgaatccttcccatgttgtcttgaaattgaaagtttggaaggtcagaaccagtcttgccatgaacacatttaaagttacgaaattttgcttttgtgatgtatttgctcttatgtttattccttgctgttttatttttcttacatgtttttgttagagcagtaaacaataatactgctaaattcacgtttgaatttttttgcttttccttatgtatctgttttcctgatttctggttttccttacaacactgaagggaatgcatgtagtgggcagagactaccaagttgaatgattgtcagtatccatttggtgattcacctgccttgatgcttatctgttcctcatataatcttcactaataccacttttgcccataaccatacagctcagaatgttaatgcttgcatattttttcattatagctatccttgtgtagccttcagttgccatgaaagtattgatttcaataatttgtttatgggaactagttgtttaaccataactatttttatttatggtgtttataatatctagaaatatatacatgttttgaactgtatacttcaggagagtttagaattcttagtcatatttgatgactggtcacacatcaacaagctgatctacacagatgcctgagttgtagagggttatttggctgccatatgaattctttgttgtttagtaatgtatcagataatttgaattaatgtaaataaaaactttttaagggaggaataagtgccacataagagaattgggaacacaaaataatcttcttttaaaaataattgataaggtaataaatataggatgctaaatttgtcacatcagtttttcttaacagtagatatgaaaagattatatttctgcaagaatttattctctacatcatattttctatcttcagtctcataagtaaaataattcaggtaatgtgtgggacagcttatccgaaacagttctttcagatttaattccttgtttcagtttatttattttgctaagcaccaataaactttacttcatctgtgttacattcattataccaccataatagtgcacaaaagaaagaaaaagaagtagaagtaagcagtctaatacaggggagagaatttttagtggataggcttaaggcagttttaaatttagtaggaatttcctttaaaatttctttcagggattttttttttaagtgatttataaacgggaaacaataaagaccaggggatttagcagaaaaatatttttatcttttgacttcatatctttcattccaactaatgtaaacaactccttaactcttatgatagaagttgtgacagaaagaagagtataccattattaaagttcataaggaagcttttgaagatttactaagaatgacagtttttaatacttgctgaaatgtgtggtatagttcttttactctgaaaccaactataatttgggtaattttttagttacccaactgatttccccatctatgttttttcctgctgaccacctatgacagaagtaagggccctcacatagaagttttacagattggtaaggaggaaataatagtaatgtaaattaagtagttgcttactctttttagaaatattgcgattttcaccttaactataaagaagttgtctaagatgtgtaaattaatgggagaaaaagtaaagaccagagaagcaaatgagctttaataactaaatgggctcacctcaggtgggataaagtgtcatagaggttttagagaccatcaacttgaggaaagctttttttttttttttttttttttaatttttaaagtttatttactggctgtgttgcatctttgtcgtcctgtatgggatctttatttgcgacctgtgggatctagttccctgaccagggatcaaacccaggctcattgcactgggaaatggagtcttggccactggaccaccagggaagtcccagcaaggccactttcagtaccatactctaacaaggatctcagcataagcattcacaaggaggtgctcagtcctagtatagaagataatttgtcttgaattgataacatcatttgtgagttaattttttggtaagtattatgcgacaacttggagaaaatgctaatatgtttaactgtatgttttaaagggaaataaagtagattttaaaatactgaattttattgggaaaaaaatgaaagttgtcttttcctttacctgaagatatctacctcttttgtatttctcttaatactgcaatttttaaaaaagattccagatatatatatattttaccaaagtttttcataagacagcatgctaacttctctcttcttgttctttttctagcccaagttcacaaatgactttcattcagttggttggttagaccatgtgctgatgaccagttgattcagtccccttcattgtggttctgaacctcatagaatgcctcatctttgtcatctttctttaagtgcatcactaggagcattgaatgaaagattcctgaaacactaattcaaacacattaccactatcagactattcaaaagtaaatattctgtgattttgatcagtagaatatccttataattaactaccaagaattctggtatgtgtatagcttttttttaccgtatttgcagatatttcactgagtcctttttaataggcatatataataataagttttcaaaaactgaacaggagtccatctgaacttattacacttttaagcaacaaattccagaatgatttgctaagttcttttgacgtttttaattgctagaaagcaaaagtataattaaatttagaaaatgctattaatacatatttcagagaacaaataccatttgagtgaaattagaaagtgtagtgtagctgacgtttataatggagttatatagcattaactgacctaataaggcaagacttcaaattatagatattatcattgcattataatgaaggggggaaaatgagtcttccacagaggactgtgaaatcaacaattacctgagtacaaagaaaacaccatgtgcttttttggtcattacacctaatagttaacatattacaggaatatcctgggggaaaatcaacccatgaggaaactgatacagctctattgtgaattatctcatcatcatagatccctcagttttggaaataatttctttaagggtttttcttgataggcatttaggttaaggtctaaatgctatagatggaactgctaacgtatttattttatgaatgaagtaataataactgcctgggccttggtcatcatggctggtgtcagttttgtccattttatcatatgatttgttcttacgtctttaaagatatctggtgggcagtcagtgagaaacactttctcactgggataataatcacttgaaagaatcactgaaaaagaaattacttttagctccatagaaaccactgtatttagtgctagtcaagatttgtggagaaggaaatggcaatctactccagtgttcttgcctggagaatcccagggatgggggagcctggtgggctgccgtctatggggtcgcacagtgtcggacacgactgaagtgacttagcagcttagcaagatttgtgagcctcttttttgaccatgtttttaggttcaaattaatgaaccttggtggcagcaatatgagagttaatatcagcatcatagcattttctaaatctgtacattattagaaatgaagcttgcttttttttagatagccatcatccgttttacagtgattaagatgagatttatttaaataaattttaatatcccttcatggaaagctttcacaaggagataattgagcatgtaattgtttttatgttatttgttcagtaaatatttattatctattatatagactatttcacctaaaatgtttattctaaatgtaataccttatattgcatataatggaatatagatattttaaatacagcactattgcaaatcagaaggccaaaggaatggttgagtccatttacctaaattaaaatttaagtaaacacagcctgattggaggactggctgcttttttctaacccatagcatttttttcaattcctacttactctctcttccttccaaaaacaaaaagtaccatctacctatcaactccatagatacttattgtttacctaaataggagataacgtattttccatctttcacatacaagctcataaactgagaggaaaaaacttgaaaatatgtatcttattatttttaaaaaagaaagtcatttatttctgttagattgagttaagagggttattttttcccctccctcttctaatctaaaactgtaggagaatttcaacaggatttataaaggaatttagtatcttggttttcattaacataataataaatggatgtaaatactggcagtcctataagcctcccaacagtttttgtgatataagaaagtagtgtttaactattagtattgccatcataatttcattagtgtggcttctttacacactttctccagtgacgcaaatacagacatgattttttggaacatcaggcttatggctgccttctctcttcttcattacttatgttggacaaactaccattatcacttgccaaaaataatcccacagtttagtagactttagttttgaggtctctcatgtcctccttagaccaccagtagctttgtcttttggagattagaaattggacgcttctttttgatgtctaacaaaccagactgtttcttaacctctaaggaagaatatagcaaaacaacattttctaagcaacatttctggaaacgtagcagcaaatctctttgaaatagattgtttggaacataggccaaattatttttgtattgtgctttaatcagatttgtgttaaggtaataataatagtaaagtctttaatatagggtaagatagttatatgtatttttctttatattcatatacagaaatgactaaagatgcaccaaattttgataatacctatattctcatgatgtaaccagttttaaaaaactaaggataaaatacagagcttacagattcaggcttctcttatactgtaaccatttccatgaaactaatgttaaaataggaagcttttctaattttaccaacttccctgttccccagttctccctttccacccactacctcccctctccaatcccgtacacactttctctgctatattttaggaaacttttttttcaatcctcatttctcctcccttctgttttctcggctttataacttatttatataacctttccaatgatatcctgtggattatgctaaattataaaaaataaatcatgtagttgagtttcaaagaccttataccatcaaaccatagttaataaaaactgaaagtttttttaaagtatgaccttaactctgctcttttcccatttatcccgagcacttcagtgttttttatgcaatgtttcaaactcctaactttccctgttatacaaaagagttgagtggcatttaaattatcaactaaaaatttccaaacttgtatttcaagtgatcagctttctcctctactgttaaataatttttattaaaaagttgttattaagtacattttatttcaaaatctttcaagtctttgctccaggtaatatatttttaaagtggtgcaagttttaatcttgagcatacttcattctaaatgttagagtctgttcacactggatgccctaaagcaaataattgctttttttctccctatctttcatttatccttaaacctcataagctagcaaaaggtccaaaattttgtcttctatctcctttgtcttctaaacctaccatatttcactttgcagaataccttaaaagattgcagtattcttttgagaagtatggtattaaagagaattctacaatgatgctatttattttcatccatctagtatttaggatgcattaaagtatctgttgctatcaaagtcttaatagattagatataacaaacttataatataaaacgtagcagttatcaaggtgaatatgtagatgggcctgtaaatggcagccttgcctcttccacaagagagtcttcctggtaacctgtaaatctgaaagcctttgctttcccagcctcctctaacctagcaagctatagagacctcaactttttctcctccatagccaaaataagagattatagttgtagaaggcatctctgactcttgctacagctctcttttctgggctttttttctttttaagtaaggattaaatttttaatgcattttctgattttaaaaataattattgtaatttaaaataatttgaacttaatttggcaagatttgtcccacttctttcccattctattgttttcctctatttctttgcattgatctctgaggaaggctttcttatctctccttgctgttctttggaactctgcattcaaatagtatatctttacttttctcctttgccttttgcttcttttcacagctatttgttaaggcctcctcagacaaccattttgcctttttgcatttctttttcttggggatggtcttgatcactgtgtcaagaccgctatacagtgtcacaaacctctgtccatagtcttgaggcactctgtctatcagatctaatcccttgaatctatttctcacttccactgtataattgtaagagatttgatttaggtcatacctgaatgatctagtggttttccctactttcttcaatttaagtctgaatttgtcgataaggaggtcatgatctgagccacagtcagctcctggtcttgtttttgctgactgtatagagattctccatctttgtctgcaaagaatataatcagttggatttgggtattgaccacctggtgatgtccatgtgtagagtcttctcttgtgttgtgggaagacaaagtttgctatgaccagtgcattctcatggcaaacgctattagcctttgccctgcttcattctgtacttcaagggcaaatttgcctgttactccaggtatttcttgactttctacttttgcattccagtcccctataatgaaaagatgagagatctcttcaagaaaattagagataccaagggaacatttcatgcaaagataggctcaataaaggacagaaatggtatggacctaacagaagcaaaagatattaagaagagatggcaagaatacacagaagaactatacaaaaaagatcttcatgacccagataaccacaatggtgagatcactcacctagaaccagatatcctggaatgcgaagtcaattgggccttagaaagcatcactacgaacaaagctagtggaggtgatggaattccggtggagctatttcaaatcctgaaagatgatgctgtgaaagtgctgcactcaatatgccagcaaatttggaaaactcagcagtggccacaggactggaaaagatcagttttcattccgatcccaaagaaaggcaatgccgaagaatgctcaaactacccacagttgcactcatctcacacgctagtaaagtaatgctcaaaattctccaagccaggcttcaatagtattgaaccatgaacttccagatggtcaagctgaattagaaaaggcagaggaagcagagattaaattcccaacatccactggatcatcgaaaaagcaagagagttccagaaaaacatctacttctactttattgactacaccaaaacctttgtgtggctcagaacaaacttgaaaattcttaaagagatgggaataccagaccacctgacctgcctcctgagaaatctgtatgcaggtcaggaagcaccagttaggactggacatggaacaacagactggttccaaattgggaaagcagtacgtcaaagctgtatattgtcaccctgcttatttaatttacatgcagagtacatcatgagaaatgctggactggatgaagcacaagctggaatcaagattgctgggagaaatatcaataacctcagatatgcagatgacaccacacttacagcagaaagtgaagaagaactaaagagcctcttgatgaaagtgaaagaggagagtgaaaaagttggcttgaaactcagctttcagaaaactaagatcatggcatccggtccatcacttcatggcaactagatggggacgcaatggaaacagtgacagacttttattttgggggagctccagaatcactgcagatggtaactgcagccatgaaattaaaagacacttgctccttagaagaaaagttatgaccaacctagacagcgtattaaaaagcagagacattactctgccagcaaaggtctgtctagtcaaagctatggtttttccagtagtcgtgtatggatgtgagagttggactgtaaagaaagctgagtgccaaagaattgatgcttttgaactgtggtgttggagaagacttgagagtcccttggactgcaaggagatccaaccagtccatcctaaaggagatcagtcctgaatattcattggaaggactgatgctaaagctgaaactccagtactttggccacctgatgtgaagaactgactcatttgaaaagaccctgatcgtgggaaagatttaaggcaggaggagaaggggacgacagaggatgagacggttggatggcatcatcaactcaatggacatgagtttaagtagactccagttggtatgctgcagtccatggggttgcaaagagtcagacatgactgagcaactaaactgaactgtaccacgtcggtgacagatcattaattttgaaatctctgcatataaatttataagccattttactctcatatttttatatatattcttgcctggatctcaatacatatttattgggtgaaatgtaaaataaaatcagccttctgaagagaaatacctatattgttctttaaaatatttttgaaacaagcttatatataatagattatttgaagatttatacatatttctaagtctttgtgtttgtttgtttgtttttaataaattcccatcacctctttaagactcacctcagcgaattctttgctggttctcactcagtcttcctttccttggatctcaccttgtccattgtgcagatctctgttaccaattttatgactgtattgtgatcatctttttaacacatctattagactatactttctgatggcagggtctgattgtgtctttattttctcatcataaagcactgcgctgccattgtggtggtaaatactgaggtgtgggattgtgatattagaattctactgctaaccccagtaaatttattttcaccctgtaagatccctgagaccagaaaacatacaaggaacaactgcagaagaaagcaggggagccttatctaggttagtgcccagaaacttccgggtaaggctctgtgaaactggactggagtggcctcttctatacattaggttcaaaactgaatgttacaactgactagtgacaagggaaggccaaagagaagagcacacaacaccatagagaggtgattgagattttcccatgtggaccctggctcagcttaccctttctgccatgtgggatgaagcaatatgagggagaagggtccccaacatatgtacaaccttttaaagcttggtgacctcacttattttgaaggtgatacaatccaggtcctaaaacttaacacatcagattagtgtttcctcatcttttgggaaagcggaggagttgacagagagacttgattgcatctgctccccttagagctgtataagtgagctctcaataaatgtttatatcaaatcagtccccttttcaaggaaatttatatttatttctgacatatcctcttctgttttaatgttcttattccgaactttgaaattcacatgttctcaatatttttgtgacttacacacttctaggattatcattacattgtgtttgtattggtatcgagacaatatataatgtaatcccagaagagttcttgaattctgtttgacctttgtgcgtaatgtgtccaagtgaaattggaccatttgcttatgaaaggaacattgacatagctatacttaagaggagaaggccctgaaatcttgatttgaaaagacatttattcatattgttaagttcatggcaccatcccggccaaggccttaatcatttgacttatcagtgttttcttttttttggtgatataagaagagtgagaatatgatatctggcttctatccagcagaatcagtaatggataaattaaaatgatttaatttgggcttatgtggtattggatagcactgattccattaagtcatttaaaatatataccttattagattattcaagtgctgtgcacatattaatataaaagcaaaataagagttatttaaaataatgaaccatgtagaaggaggccttttttctggcttttatatttttccagttttattgagaaataattgacatacagatgtatgatttttagttcacttttatcatgaaatgattatgacaataggtttagttaatatccataacctcatatagctgcaatataaagaaaagaaaaaagttcacttgtaatgagaattcctaggatttactgttagatggcccagacggtaaagaatctgcctgcagtgcaggagacctgggttcagtccctgggttgggaagatctcctggtgaagggaatgactacccactacagtattcttgccttgagaattccatggacagaggagcctggtgggctacagtccatggggttgcaaagagtgggtttgcaaagagtcgaacacaactaagtgactaacactttcatatcatatacaagtattatctgtagtcatcctgttgtacattacatccctagtccatatttatttataacttttactagtttgtaccttttgacccatcttcctccagttactcctgcccctcctctctgtctctggaaccacaagtctgatctctttgtctgggagtttggctttttgttttgtgtttagattccacatattagtgagatcatacagtagttgtctttctctgtctgacttatttcacctagcattatgctttcttttttttttttttttggtttttaagtaaatcttttttattacccactgaaaatccaattagtattttatcattcttttttttttttttttttactttacaattctgtattggttttgccatacattgacatgaatccaccatgggtgtacatgcgttcccaaacatgaacccccctcccacccccctccccacaacatctctctgggtcatccctgtttcaaaatccacccatattgtcacaaatggtaggattctgttggtttttatggctgaataatattgcattgagtgtagatccattcatccttcagtagacatgttggttgtttccatgtcttggctattataaatagtgctgctatgaacatgaggatgcagacatcggttcaagttagtgttttgggggcttggggatatgctgtcagaactggaattgctggaccatgtggtagttctccttttaatttttttgagaattatatactatactgttttccacagtggctgtaccagtttacagtgtcacaaatggtgcgcagggttttcttttttccatatccacactagcagttgttatcttttaatcatggccattctatcgggcatgaggtgatatctcattgtgattttaatttgcatttctctagtggctagtgatgttgagcatcttttcatgtatttgttgatcattcatatatcttctttggaaagatgtttattcaagttctttgcccattttttatttaaattatttttgttgttgttgttctgagttctatgaattctttatatattttagatattaacctcttatcaggaatatgatatgcaaatattttccccacttcataggttgtcttttcattttgctgatggtttcttctgctgcgtagctttttagtttgacgtagtctcacctgtttacttttaacattgcctcttaatctttaggtatgatttctgtaaaaccattactagatccatgtcaaggagctttctgtgttttcttctgagagtttcatggtttgggggtcttacatttaagtctttaacccatgtcaagttagtttttatgggtggtacaagatagtggtcaagttttattcttttacctgtgaatatctaattttcccagcaccatttattgaagagactcttttctccactgagtattcttggctctcttgtccagtattagttgcttgggtttatttctgggctttcagttctattccactggtttatttgtatgtctttatgaaggaggcatatttaataattgaattatcttgtgttctttgtttagggtgttccagtgatggcaataagaaacaaaatgatatcagaaggactagacccagatcttcttgagtaagtagttcttctgatataatgatattactatcaaggtgttgaatttatcagtcttcataaaaacattttaagctctatatatgtttttcctatacattgttttatggtcagggaaacctcctccacaaataatgtgtctgctatgtttaaaaagtgaaaaatctatgctatactactaaaactagccttaaaacagtttaggagtgttttcaataaattggtgatgaacctgtatatgcaaaagagatggaaattgatgacatttttgtttcacagcagtagtatcgacaagaagcattgttccttttctttctgtgctgcattttttctctccgtccctccccgtcttctttttcttaatttgttgttttttatgtataagaccttagtatatagaaaatttactctacatgacctaggttgagccagatgggaaaataaatagagtaagtctatggtaatggttattatggaactagatattgtttgtgtgagttttataaaaaaatttttttgaaaaatgctgaaaagttgtgactcagaaatttgacagttatttattccatccaggcaaacctggctacacagctcatcctggataagatatatcttaatggattattcaaaactattctcttttgcaaatatctagacacatgtaaagagtctttccagtttgggggttttagttcatcccaatgtatttagctatgttagctctccaggcattcatactatactagcagtatactttggaattcttcttggctctgagcccttcaagaaaatgtatgcattttttctttcataaatgcaatctttttctcattttatctttcaaaatatgaaatttaaaaacatattttgaagtctagaagaacagatttcctgcacgtatctccatttagtatatatttcagtagcaaacagttcaagtacaatggtatggattggtaatttgaaccaaacatctccaggatatttggcatttgttctggaaattgtttctgacacactttaaaagcagatggattgtgacacatactttaatgtgaattgaacatatgggtccaatccattttggtactcattggaatatatgttgtaaatatatctaacattgaccatgaccccttttttgcttctggaaatacacagtagagcttctgtactaacagagagctaaaatgacctttaaaatgataattttttctctctggagaaaatgtaataaatgggaaactagcagccctgttagcatcagcatatgctagttcttcattccctcccccccctcctggctgcattgcatcccctgcctagcctaaaactccttcataatcctttacttcaactggctacccacactaacaacttgaaagtcacccttgattctgccctcctcccttcccctcactatgtcagtcactgtggttttctcatttttaatctcacatctgaccatatgcctccaagccattgctgtttagttcaagccctcatcatttctcacctgatttattttaattgctcctttttggttttctattctctttcagtccgtcactaaaaacttaagtggatgtcttcatatagttcatctgttcatacatacaagtcttcctgtgactctctgctgcccttaacatatgctctgacatcttagaattgcaaataaatgcatttatcatcaagactctggcttcatctcttgccaatcatccatgcatccctgtctcttagagctgtagcagactacttatatggttctctgactgtaccattttcctggtgtctttgaaagtttgtattcttccccatggaatttccttcccccatgttattggccaggctgatttgatattctttaagatcccatttaggtatcacctttttaagaagttagtggatgactaccaaggggagaacccctaggacctccagtactttcttggtgtatctcacttagcaagtttgagcgcacgtcattgtctgtaaatgttgagaaacattcagctgcaaggtggtgccaagttttagggtagaattccagtaacagttaacattgtcttacagaaaagctgctcctcaaccacagcctggagcctgaattctgacccattacctcatgagtacatgccattggtcacaaggggcactggttggagtagggtgactcactataacctatcaccactacaactagaaaaccagctgcaactacatttagctagatatgataagtggaatcaaccaccttgttaaagaggacttctgtcactttaggaggagtcatgtttacataaaagttaaggagccttggtttaaggggaaagtcggagatgaagaaaatgcaccatccaaggaaagagtgtgcttttatttagaatattaggtacatattaaacctaagccaaaaactttgactaaagacggttcttttctcttttaaagtataaacataaacttttctttttagccctaggtagtgagacaaacttatgtaattgtaggaagaagtagtctaaatctgtttgcactgaacaaagagtaaaactgaggttaatataggaataaatactgatcagaaaatagactgttataacagtttggaaactaagagtatgtaactttgaaccaaaacagtttacttgataagggagaagagaacctggctattttcttacaaaaatgactatcactgaattttagaaagtctataaaactgaagaaaatgccagataattaccaaaaaaatagtatttgtttgctacttcttagtgattatttaatcttcttaaaaatctaagtttttaaaaatgatgatagggcttatataaccaagacttagttttgggtctagcttgtaaaaattagctcttagcttataaaaattagttttaaaaaatgcagtgaattaaaaagatatgtgaaagagtacctttgtcacctttgtcatcatacacacaagttgatggaaaggaaagaaaatagaaaattttcaggttgatctgttttagaaatacagaacagataaatcataccttataaattttttcagtcaatgcctagattctcttaccaagaaaaaggaaaaatgtttctccctatcctattctatggcttcatttatgtcccataactaaggttactattactagtaattactacttttactactctaagataaatagcctctgaacctgtctagcaagagaggaaattagtgatggctaagtctcagtctaaggcagactttagaaatggtctacttgctgaggtccagattctgccctgcccctttctagctgtatgaccctgaactaattacctaatcaatctgtgcatccgtttccttgtaaatgtaaaatagaagagttcaccctttatagattcattcagactaagtaagcactcagcgcagctctgaacaagcagtaaatgttcagtaaatgttagttgtgatttatgaatgttttaatggaagaatatgtagcaagttctaaacaactggatttaccaggctctcagatcacaacttgtttatagtcccgtagttgcctgtataccattgtggtctcaacacagacatatataatgtacacagagtaattatccttttgagttatattctctgttttcccaaactgaaaaatctgtattttcaactttgtagtaaagaacagacttctgaaatttaaatttaactggtcacattcttaatgttagtaggagagtacagtttgcagcataatgatttggctaaagaaatcaagttatgcaggctttaaacagaaccagctaagttggcatttgtcctggatatatctattcaaaagacatttatacccttttctcagactgtgcagtgaccatgattgtggttgccaggaataaaagtaaccacctcagcctgcttatcactgagatgagaggagatttattagtgataaacaaaaggatactggaaagcaagaaaactttatttaattatattcaagacatatccagcagagtttcctgccctctaagggaattccttatctgctagtgatttgcctgtctcctgctaccaaacaacataatggattaaaggttgaattttgtctagttgagcatagaattgatctcagttctccaactgagcaattccaaaaacaggtttttttgtttgttccatttttctagttcttgcttaactggtatttcattcaaggtaattaccagtcgttgatgacagaggatgagacagaggggcaacagaggatgagatggttggttgatatcacctactcgatggacatgaatttgagcaaactctgggagatagtgaaagacagggaagactgatgtgctgtagttcatgggttcacaaagagtcagacatgacttagcgagcgaacaacaaccagtccttgaccactggctggcatactgactagaaagaagtataggacaggaaaaaacaatgtcagaaaactgattagtccactgttggaggcttagatcacaagagacagttcagttgctcagtcgtttcccactctttgcaacaccatgaaccacagcatgccaggcctccctgtccatcaccaactcctggagtccatccagacccatgtccactgggccagtcatgccatccaaccatctcatcctctgtcgtccccttctcctcctgccctcaatctttgccagcatcagggtcttttcaaatgagtcagctcttcgcatcaggtggccaaagtattggcgtttcaacttcaacatcagtccttccaatgaacacccaggaccgatctcctttaggatggactggttggatctccttgcagtccaaggcactctcaagagtcttctccaataccacagttcaaaagcaccaattcttgggcgctcagctttctttatagcccagctctcacatccatacatgaccactagaaaaaaccatagccttgactaggtggacctttgttgacaaagtaatgtctctgctttttaatatgctgtctgctgctgctgctgctaagtcgcttcacttgtgtccgactctgtgcgaccccatagacggcagcccaccaggctcccccgtccctgggattctccaggcaagaacactgaagtgggttgccatttccttctccagtgcatgcaagggaaaagtgaaagtgaagtcgctcagtcatgtccgactcctagcaaccccatggactgcagcctaccaggctcctccatccatgggattttccaggcaagagtactggagtggggtgccattgccttctccgaatatgctgtctaggttggtcataactttccttccaaggaggaagcctcttttaatttcatggctgcaatcaccatctgcagtgattttggagcccccaaaaataaagtcagccactgtttccactgtttccccatctatttgccatgaagtgatgggaccggatgccatgatcttcgttttctgaatgttgagctttaagccaactttttcactctcctctttcactttcatcaagaggctctttagttcttccctttctgccataagggtggtgtcatctgcatatctgatgttattgatatttctcctggcaatcttgattctagcttgtgcttcttccagcccagcatttctcatgatatactctgcatataagttaaataagcagggtgacaatgtacagccttgatgtactcctttcccaatttggaaccagtctgttgttccatgtccagttctaactgttgcttcacaacagtaagagataagagataataaaaatattgaagaagcagtgttaaaaacagttggggtctgccagtgtctagcaagaagttaggggagctattgtgatgtaccccaagataaacagcagaaacccatcttacctaggatagctagctttctttttctttatcatattaggcattgtgttgtttctctggctggggaatctacttaccacagcaaagaacaggtatacctgccttgatgggcattcagaatagaaaagaccaaactgtgtagtttgagtaaatgtaatgctgaaataagtcttacgagttactgtagacaaaattgtctttttttttttttaactatcctaaatgtctttatatagtcaatgtaaccagtactttggccacctcatgcgaagagttgactcattggaaaagactttgatgctggcagggattgggggcaggaggaaaaggggacgaccgaggatgagatggctggatggcatcactgactcgatgaacgcaagtctgagtgaactccaggagttggtgatggacagggaggcctggcgtgctgcgattaatggggttgcaaagagtcggacacgactgagcgactgaactgaactgaactgaatcttagttcaggaattcagtgtttggctgtttccttaagaccacttattaactattgcataggtggctcagatggtaaagaatctgcctgcaacacaggcagacctgagttcgatccctgggtcagaaagatcccctggagaagggaatggcaacccactccagtattcttgcctggagaatcccatggacagaggaatatggtgggctacagtccatggggtcaaaaagactcagacataactgagcaactaacactgagaacgacactaattgacaagtatcatgtgacattataactgtgtgtgcaatagttgatattgaaaagtgatttgaataactatcacaccctatccccacaaccctgctactcagcagtatttgctctaacaatgtttttggcacttcatctgctttaaattccactgctttaaattgaaagaaaatgaaaaatatctttaaactatttacctacataaataaatgtttttccaaagaatatttataatgtttgccatcaaagtggttttgattttaagcacaaatgtaaatctctttttaatgaaaacagatcagtggtgtttatatcttaagactcctttatgtacaggatcacagaaatgtaactcaaactagctaaagtaaaaagggaagttattgactcacatccctaagaagtctaagcaagacaaaatcaggggcacagcaccattattgctggctggttggtattttctctcacctgtacctccgtctgcctttaatcaaacatggcataataatccacttttctcctactgctgataagcttcctcctggaaaacaaggaattagcaaataatatttgctttatattttaaatggctgtaatattgctagtttcaccaactgaaaggaaggagaaccccttctccatagtccatagctcatttctagggaagcattctgattgtccccgtttggcttatgagccctcccttatgctggtgtctttacagagaatgattctcctgacctgccagtcctggattatgtgactgaaacaaggaacagtataaggaaaggatgaagatggcagggattgtggttgacagtcttgtttatgtaaatgggagaaaaatgacagaaaaacgcgcacacagcatcctgtttgctaaaaagtactgatttgtatatggttagtccttttggagaaggcaatggcaacctactccagtactcttgcctggaaaatcccatgggcggaggagcctggtaggctgcagtccatgggatcgctaagagtcagacatgactgagcaactttgctttcactttccactttcatgcattggagaaggaaatggcaacccactccagtattcttgcctggagaatcccagagacaggggagcctggtgggctgccatctgtggggtcgcacagagtcggacacaactgaagtgacttagcagcggcagcagcagcagtcctttcctttctaaattttggctccgttttagttgaggtcaacctagtaatctttgaaaatatctctttttaaagaaattaaacagtaaggagtttaaagttaagctttaaaaattttgcttttactaagacttttattgataatcttaatgccacaaattatataaatatgcttattaaaatatagctaccaagataaccactaaagattgagattttttaaaatatatacatgataaatcatgaatatgacttcttatttttttctgcgttttgctgacgtagtcttttttagtgattcatttatattgtgtaaaatactgagagtagtatgaaatctttatttccacattttagtagtgaagtgtgactagtaaagtagcaaccatttaaaacatatcttttaaaacttctttctttgaaagaaaattaaaaggtatgcatgtgcgcacacacacacacatatacacagaatcaagccagagcagttctgattattaaaaagccaaatactattccccctaagaatattaatatgaatatccagtctggaaatgttgttaagagttttattattacattaacatttttaaagctttataacttatttgattttcacaatttttgaagttttttatataacaaaaggaactctagtatgtagcttttcttttgttttcatagcaattacaattcaaagtagctttaaatttattttaaaaatgaatgagggcaagcaaaaaagtatcagtaaaatatgaagaaattgtaacccttgtacactctgggtgggagtgtaaaattatataattgctgtggaaaacagtatggcagtttctccaaaaatcacttctgggcatatactcaaaaaagtgaaagcagagactcaaatagatgcttgtatactcatgttcatagcagcatttttcacaatagtccaaaagtagaaacaacccaaatgcccatccataagtgaatggataaacaaaatgtattatctgcatacaatgaactattattaatcctaaaattgaaaacaaattctgatacatggtacaatatggatgaatcttgaagacatgataaatgaaagaagacagtcacaaaaagacaggtattgtataattccacctacatgaggtacctagagtagacaaattcatagagacagaaagtagaggagtgattgtcacaggctagaaggagagagaaatgaggagttattgtttaactggtacagagtttcagttttgcaacatgaaaagaattctggaggttggttaagtggtgatgattgcacaatactgtgaatgtactcagcgccactgaactgtacacttctaaatggttaagatggtaagttttatgttatgtgtattatacaacaataaaagaaatgagaaaaagaagaaatgaacaaagacagagaataacaagtgttgacaaagatatggagaaattataactctcatattctgatggtggaaatataaaatgatgcattcactggggaaaacagtttgacagttcctcaaaaagtcaaacatggagttaaccagatgactcagcggttctacttgaggtttgtactcgagtattctaaacatacattcacacagaaacttgtacacaaatgttccactcgcattattcataacagccaaaaagtagaaataacctaaatgttcatcaactgatgaatggataaacaaattggtatatccatggaatggaataatattcgccataaaaaggaatgaagtactgataaatgctacaacatggaagagtcttgaaaaaaaggctaaatatcctcgatcctatttatatgaaatgtcctgaatagataaatccatagacacagaaaactagattcatggtcatcagaggatgagggggaaaggagatggaatgtgtctgctaatgagttttaggtttctttttggagtaatgaaaatgttctagaattagatagcagtaatggttgcacaaccttgtgaatatactaaaattctaatttgtacagttttaaatggtgaattttatggtatgtaaattatatctcaattaaaaaaataaatgacttcttaagtgtccatcaacagatgaatggttaaagacttgatatatatatccaatagaatattattcaaccatacaaaagaatgaagttttgccatttggatggacttggggggtattatgctaagtgaagcaagtcaggcagagaacgacaaatactgtatgatacgacttatacatgtggaatctgaaaaatatcaataaaccctagggagtataacaaaaaagatgcaaactcacagatatagagaacaaactagtggttaccagttgggagagagaggtggcaggggcaatatcaagaggggattaaaaggttcaaacttatatataagtaaactacaaggatatattgtacagcacagagtatatagccaatattttataatgactataaatagaatattaccttaaaaaattgtgaatcactgtattgtacacctgtggcttatataattgtgtacaccaactatacttaaatttttttttaaatgacttcttaaaattcctaaacttagttgtgtgatttcactgaaagctgacatttcatataacttctctgcactctccacctattgtccctaccaaatgacctaatctcatctactgttttactccagttacttttctacaccctagctaccaaaagatttataggtcccaaatgcactgtgctgcaccatccctgttttttctttattcagaatgctctcatccccacttagtcccacattttctgtttctgacaaattcatgcctatcccaacactcttcacaagtgtattcacctttcttgagttttctgtgactaacgctgaagtgaagtgaagtgaagtcgctcagtcatgtcctactctttgcgaccccatggacctatgtagcctaccaggcttctctgtccatgggattctctaggcaagaatactggagtgggttaccatttccttctccaggggatcttcccaaccctgggatcgaacctgggtctcccgcatcagtaacgctagtagaatgaattaccttttcctttcaaacaagtgtagttactacaattatattttgtgtatcacactgtataagaatagtttatttccttctgtctcccccactaaattatcaacttcagagcagcaactacttattatttgtttctgtacctgcagcacctaaaaactttcttggccaagtagtaggtacatgataacaatgagaattataatcataataatagatagccattatttaatatacctactatgtgccacatgacaaacctcgacagcatattaaaaagcagagacatcactctactgacaaagggcagtatagtcaaagctatggtttttgcggtagtcatgtacaggtgtgagagttgaacaataaaaaaggctgagcactgaagaattgatgctttcgaactgtggtgttgaagactcttgagagtcccttggactgcacggagatcaaaccagtcaatcctaaaggaaatcagtccttgaatattcgttggaaggactgatgctgaagctgaagctccaatactttgaccacctgatgcaaagagccgattcattggaaaagactctgatgctgggaaagactgaaggcaagaggagaagaggatgacagaagatgagatggctggatggcatcacccactcaatggacatgagtttgagcaaattctgggagatattgaaggacagggaggcctagcatgctacagttcatggggtcacaaagagttgggacacgactgagtgactgaacaacaacaacaatgtgccatgtattattcagtgtattttgcagttagtaattcatcctaatattcacaacaatccagtcagtcagttgggtacacagtgtagttaaatagtttccccaaagttgctcagaaactacatagcaaggctaggatttgaacccagtatttatacacactactaatagagttccttgcttctgtggagaataatgaagactgtgttcccatgttagcattttagtcagtggagcatcagtcaaaaccactaaatgctgtacttagctctaacactttattatactgagtacatgtgacttcctcatgggcataattaattttttttaatttatttattttaattggaggctaattaaaatattgtagtggtttgccatacactgacatgaatctgccatgggtgtgcatgtgttccccatcctgaacacccctcctacctccctctccatcctattcctcagggtcatcccagtgcactagcccagagcaccctgtctcatgcattgaacctggactagtgatctgtttcacatatgatatacatgtttcagtgctattctctcaaatcatcccaccctcgccttctcccacagagtccaaaacactattctatacaactgtgtcttctttgctgtctcacatatagcgtcattgttatcatctttctaaattccatatatatgcacattagtatactgtattgatgtttttctttctgacttacttcactctgtataataggctccagtttcatccacctcattagaactgattcaaatgtattcttttaaatgactgagtaatattccattgtgtttttgtaccacaactttcttacccattcgtctgctgatggacatctaggttgcttccatgtcctggctattataaacagtgctgcaatgaacactggggtacatgtgtctctttcaattcttgtttccttggtatgtatgcccacaagtgggattgctgggtcatacggcagttctatttccagttttttaaggaatctccacactgttctccatagtggccatactgcattcccaccaacagtgtaagagggttcccttttctccacaccttctccagcatttattgcttgtagacttttggatagcagccattctgaccagtgtgagtgagatggtacctcattgtggttttgatttgcgtttctctgataatgagtgatgttgagcatcttttcatgtgtttgttagccatctgtatatcttctttagagaaatgtctgtttggttcttttgcccattttttgattgggtcgtttatttttctggaattgagctgcagaagctgcttatatatttttgagattaattttttgtcagttgctttgtttgctattatttttgcccattctgaaggctgtcttttcaccttgcttatagtttctttcattgtgcaaaaacttttaagtttaattaggtcctatttgtctaattttacctttatttccattactctgggaggtgaatcatagagaatcctgctgtgatttatgtcagagagtgtcttgcttatgttttcctcaaggagttttatagtttctggtcttacatttagagctttaatccattttgagtttatttttgtgtatggtgttagaaagtgttttcgtttcattcttttacaagtgattgaccagttttcccagcaccgcttgttcaagagattgtgttttctccgttgtatattcttgcctcgtttgtcaaagataaggtgtccataggtgcatggatttatctctgggctttctattttgttccattgatctatatttctgtctttgtgccagtaccatagtggtgattcctccaggtccatatttccatacaaattgtgaaattatttgttctggttctgtggagaaaaaccgttggtggcttgatagggattgcattgaatctatagattgctttgggtagtatactcattttcactatattgattcttccaatccgtgaacatggtatatttctccatctatttgtgtcttctttgacttctttcatcagtgttttatagttttctatatataggtcttttgtttctttaggtagatatagtcccaagtattttattctttttgttgcagtggtgaatggaattgtttccttagtttctctgttttcacattgttagtgtataggagtgcacgggatttctgtgtgttaattttatatcctgcaactttacaatattcattgattagctctagtaattttctgttggagtcttgagggttttctatgtagaggatcatgtcatctgcaaacagagttttacttttttttgaatctggattccttttatttctttttcttctctgattgctgtggctaaaacttccaacactatgttgaatagtagtggtgagagtgggcacccttgtcttgttcctgactttaggggaaatgctttgaatttttaacctttgaggataatgtttgttgtgggtttgtcaaaaataggttttattgtgttgagggatggcatcaccgactcgatggacatgagtttgggtaaactccgggagttggtgatggacagggaggcctggcatgctgcaattcatggggtttcaaagagtcagacacgagtgagcaactgaacggaactgaactgaactgatgttccttctattcctgctttctggagggtttttatcataaatggatgttaaattttgtcaaaggctttctctgcatctattgagataatcatatggcttttatctttcaatttgttaatgtggttttttaattgattgatttgcggatattaaagaatccttccatccctgggataaagcccacttgggcatgatgtatgatctttttaatatgttgttgaatactgtttgctaggattttcttagggatttttgcatctatgttcatcagtgatattggcctgtcgttttctttttttgtggcatctttgtcaggttttggtattagggtgatggtggcctcatggaatgagtttggaagtttaccttcctctgcaatttctggaagagtttgagtaggataggtgttagctcttctctaaatatttggtagaattcagctgtgaagccctctggtcctgggcttttgtttgttggaagatttctgattacagtttcaatttctgtgcttgtgatgggtctgttaagattttctatttcttcctggtttagttttggaaagttatacttttctaagaatttgtccatttcttccaagctgtccattttattggcatatagttgctgatagtattctcttataatcctttgtctttcattgatgtctgttgtgatttctccactttcatttccaattttgttgatctgattctactccctttgtttcttgatgagtctgactaatggtttgtcaattttatttatcttctcaaagaataagcttttggctttgttgatttttgctatggtctcttttgcttcttttgcatttatttctgccctaatttttatgatttctttccctctacgaaccctggggttcttcatttcttccctttctagttgctttaggtgtagagttaggttatttacttgactttttccttgtttcctgaggtaagcttgtattgctatgaaccttccccttagcactgcttttactgagtcccataggttttgagttattgtgtttttaatttcattcatttctatacagatttttatttcttttttgatttcttctgtgatttgttggttattcagaagcatattggatagcctccatgtgttggaatttttaacagttttttccctgtacttgacatctaatcttctgccttgtgatcagataagatgcttgaaatgatttcagtttttttcaatttaccaaggctagatttatggcccaggatgtgatctatcctggagaacgttccctgtgcacttgagaaaaaggtgaaattcattcttttggggtgaaatgtcctatagatatcaattaggtctaactggtctattgtatcatttaaagtttgtgtctccttgctaattttctgtttagttgatccatccatagatgtgagtgggatattaaagtctcccactattattgtgttactattaatttcccctttcatactcgttagcatttgccttacatattgtggtgctcctatgttgggtgcaatatatttataattgttatatcttcttcttggattgatcctttgatcattatgtagtgtccttctttgtctcatttcacagactttacttcagagtgtattttatctgatatgagtatggctactcctgctttcttttggtctccatttgtgtgaaatatctatttccagcccttcactttcagtctgtatgtgtcccttgttttgaggtagatctcttgtagacagcatatataggggtcttgtttttgtatccattaagccagtctttgtcttttggttggggcattcaacccatttacatttaaggtaataattgatgagtatgattccgttgccatttactttattgtttgggcttcagtttatacacctttctgtgtttcctgtctagagaagatcctttagcatttgttggggagctattttggtggtgctgaattctctcagcttttgcttgtctgtaaagcttttgattttgctgggtacagtaatctgggctgtaggtttctctctttcatcactttaagtatgtcctgccattccctcctggcctgaagagtttctgttgaaagatcagctgttatccttatgtgaatccccttgtgtgttgtttgttggttttcccttgctgcttttaatatttgttctttgtgtttgatctttgttaatttgattaatatgtgtcttggggtgattcgctttgggtttaaccttttgggactctctgggtttcttggacttgggtggctgtttccttccccattgtagggaagttttcaactatgatctcctcaagtattttctcatggtctttctttttgtcttcttcttctgggactcctaggattcaaatgttggggtgtttgacattgttccagaggtctctgagattgtcctcatttcttttaattctttttttcctctctgcttcatttattcccaccattgtatcttccacctcacttatcctatcttctgcctcagttattctactattggtttcctccagagtgtttttgatctcatttattgcattattcattattgatttactcttttttttctattctaggtccttgttaaacctttcttgcatcttctcaatccttgtctccaggctatttatctgtaactccattttgttttcaagattttggatcatttctactatcattattctgaattctttttcaggtagactccctatctcctcctcttttgtttgattcagcgggcatttatcatgttcctttacctgctgagtatttctctgccttttcatcttgtttagattgcctgtgtttggggtggtctttctgtattctggcaattcatggttcttctttattgtggaggtttctccctgtgggtggggttggatgagtggcttgtcaaggtttgtgttctggtgggtggagctggatttcttctctctggggtgcaatgaagtgtcccagtagtgagttttgagatgtcttgggtttggtgtggctttcagcagcctgtatattaaagctcagggctatgttcctgtgttgctggagaatgtgcatggtatgtcttgctctggaacttgttggttcttgggtgcagcttggtttcagtgtaggtatggaggcttttggatgagttcttatctatcaatgttccgtggagtcaggagttctctggtgttctcaggtttggcgtttaagctcctgcctcttgttttcagtcttattcttacagtagcctcaagacttctccattcataagcactgatgataaaacatctaggttaatgtagaaaagattctccatagtgaggaacacccagaaaggttcactgagttacatggagaagagaagagggaagaggaagataaaggtgaccaggaggaggagaagggaatcaaaagggaagagagcaatctagccagtaatcaaatccttatgtgctctccactgcctggaacacccagagaggtttacggagtaatatagagaagagaagagggagtaaggagatagaggtgaacaggatgagaagagagggggtcaaaagagagagacagacctagccagtaatcagttccctaagtgttctccacagcccagaatacccaaagaaattcacagagttgagtagagaagagaagggggggagggaggagatagaggtgacctaggggagaaaaagagtcaaaagggggagagggcaatcaagccagtaatcacactcctaagtaaaaatgggtactgaaaattggattcttaaaggtacaaaattgataacaaataccaaaaagcaaagattaaaaatctagagtagaggttgctgctgctactaagtcacatcagtcatgtccgactctgtgcgacctcatagatggcagcccaccaggctctgccgtccctgggattctccaggcaagaacactggagtgggttgccatttccttctccaatgcatgaaagtggaaagtgaaagtgaagtcgctcagttgtgtccgactcctagcaaccccatggactgcagcctaccaggctcctccgtccatgggattttccaggcaagagtactggagtggggtgccattgccttctccgagagtagaggttagactctcaaaaatacaatattttaaaaaaatcacaaaaattatattgaaaaatagatgaaatttgctttaaaaatagggtccttttttcttgaaaggtaatagtaggttataaaatgaaaattaaaggagtaataaaggacttaaaaattttttaattaaaaaaatgaaaacagaaaaatgtatctaggaatttctctggagctgttgtgggcagtgtggggtcagttcagtttcagatagttccttgttccaacttatacttctcaaggtctataagtcccttccaatgtagttggtgctaactacagagttttaatctgttgaacctgtcacttccgaagcagttccctctgtttattttggcttcttctgtttgcaagtctccggtgtctaatttccaccctgacacaagggggtggtggtgatcacttatttaggctcacttgttcagtcatcctgttgggagggaggaacactgcaaacaaatatcactggcgtgtgtggggagtgctcgcattgtcacggccacactgggtttgcccctgctcacggcgtgtgtgctttcccagtctacactactcagactccaggttgctctacaggcgaactgtctaaagcgggccctgggttgcctaggtctaagccgcccaggctcaggttcaggttctcaggtactccgcaaaggcggagactcagttgggcctgcattttgtgcctttcctaggtctgagcagctcaggcgaccaggtgcttggcgagcacactctccccaggtggggcggggcatcttatcacctccccagtcccagccgctccgtttcctgggtgcacagcgggagcaccatctcaagtgtgttgtgtgtctcctctggggaactgatctctggctgtgaccttcctggcggatgtcaaccgtccaggattctaggaagacttggttagcaactgggagcctgctcacagtttggtagaggatgctgtctctggggctgagattgctcctttctggctctggctattgcccgcctgcctccctgcctctggcagacaatgggccagtccaagaaggctagctctcctgtggtattagcccagtcctttgttctgtgagggggccggcagtgcgttaggttagagcttttcactggaaagttctctttttttctctctctctctctctggctgtcacactgtttgcattgctatctcacgttagctccttcacattgccctcagggcattcaggctcagtccctaccctaaacctgttcagcaccccttgctggtggcagatgctagtgtctaggctacttctccgctgggtgttgccgttaggcacaggcacgtaatctgtgggttttatttatttatttttcctcccagttatgttgccctctcagattccaaaactccccacagacctgccagggagagggtttcctgatgtttggaaacttctcctcttttaggactccctccccggaagaggtctccatccctaactcttttgtctctctttttatcttttatattttgtcctacctccttttgaagacaacgggcttcctttctgggtgcctggtgtcctctgccaatgttcagaagttgttttgtggaatttgctcagcgttcaaattatctttcaatgaatttgtgggggagaaagtggtctccctgtcctattcctccaccatcttaggactgcccccccataatctaaaattgtacagtagagcaaaggggtttatgtttgacccattgctaaggagcagtgccagcatttcttctgtttcatagcacaacagacatgatattaaaaactaagtcagaatttggccataattcataataactaataatataattcataataacaagtaggagattatacattttattttagcaataattattatatttgtggcaaagaagagttttgtttgttggtatcttaaatcttactaagaatcaaggagcctgagagaaaaataagttttgtagcttttaattactgaaacagagcagctgtattagtcttcctttccctcttataaggtttcccccaggtatactttgcttaatttgctttcttggttagagtgaataggtgctgagtgattgtgctgctacattgattaaatgatttattaacaaacactatggaacctatcaagttgactgttgcaatgacaccaataaatttcctgtggttttttttaataacatatctatacaaagctggagtttaaccattctcacatcatcttgtgcctagggaatcttcaagacattatttttatgaactaattcttcttatgtttatctgatgataaagcatataagtgaaaacactcagcagacattaagaaccacctttgaacagtcactctcctcccctacaagatttctgtattgcctgtgtttcttactggccattcttgaaatctcttccatttttaaattactcccttcagctttcctgaacatgaaggttttcttttttttttctcacttctagctcttctctctctctaccttacggacacttggaggctgcaagtatttagcactggtcatgccagcctctccagatcacatctctgtctgtcattgggtctccatggtaatgagaagcagaaagtgctgaagtggcacactgtgtaaggactggcaggaggaagtggtgccatggcctgcataggaatagcactgaatccccatggtactggagaagcctgcgagaagcatgctgtgtgtggtggagagcagggggctcttggggaaggacgcagacttggcagatttattagcagcagtattctaggatgaacctaatttacagttagtgattttttttttcaactggaaaaacctttaaatttctttcttttttttttcccttctctttcaggaggccagatgctccagtgcctgatggtgaaggtgaaaaaaacacagaagaaagttcagatagcgaatcttcttttagtgactaagcttaattttcataacaattacatatgcatgtgttagtacacctttacattctataagagagcctgaactgtaattcttagttataaaaacatcaaatggctacagatctgccaccaagcttcctctgtgttaaaaaaaaaaaaataaagcatttataataagctggcagtttgtcttgttaccaaaataaaggtccctgctgagaaatagaatagcctaaataaagtactaagatggactatttcagagatgcaaggagcatgtagaatgaagtcagtgtgaggttggtgttcaaaaatagactcaatgcaaaaaaaaaaaaaagtgactttggcaaagtgaacaattcaatttttgtgaatactttagcatgataagtattatgtacacttgtatcataaggttgttaaatttctgtcagaaattaatactggattgaaaatttttgtgacaactggaagcttatatattacgtttattgtaggtctggaacttattg

SEQ ID NO: 225 - DNA, 7703 bp, Hippotragus leucophaeus
  source 1..7703: mol_type = genomic DNA
aatctgatgggagggtagagccccactctggagcagtgattaggagaccctctgcggtcagttgagcataacagagctccgactgcatgtagaaagcccagggactgggcagccacgaaagaagtgtggggcaaatcaggtggccagggtgggttgttggagcccagcactgtcaaggcaggtctgggatgcaagaaggaggggcccaggcaagatgcatggccaggcctgagtactggctctctgaccccctcagccctgaccccctgctttgggcctcagtctcccctcccctgcccctctgcccagggctcagggatgccatttgcttcactgagcccatctatctgaaacggtttcacatcttcctcttttgtgactggaagtcacagggcaaggcgtgaaaccatcagtcacagaggcaacacagagcctcatcgtttgaaggggttgaggtgagggggcagggggagagcggcagggtagccccgggccggtggatgaggaggggcaccagtgggagcaaggtgcccaggaccatggctgaggccatcacctatgcggacctgcggtttgtgaaggctcccctgaagaagagcaactccagccggctaggacatggtaagggcagcggcagcggctccttgattctgcagctccatcctccttcgagatcccactcccaccccacagacccccatcctgatcccacctttcctctcctctccagacccggaggctgatgaagatggcgaactcacctatgagaatgtgcccccaggcacaggaggaccctcgagcttggcttcctctggattacgggataaagcaggtctggggagcctgggggatgcgtgtttgtgaggggctgtgttttgagttgggggggtccacagcattcttgggaggacagtatccttggagaaaggatgggggttctcaggaagagaatgaggaccaatcacaggagccaaggaagaataaagcttccagtggggagcgagggctctatggagggatcagggcagccctgttggggtgcagagctccagtgagaaatgggagtccctagggagaggggagagaagagaagagagggaagggggaggaagggagagcactcctggggagagggttctggcaggcagatcagtggccccaaaggcaaagatcaagggagaccctgaagggttatagaggctccccggggaaaggataaggtaagacctacgaggggcacgggagccccaggggagatgaggagctccggagagcgctaagggtggccccgagcggcggctgaaggcaccttaggacagactggagtctcggcgcggtggagcgggtaggagtgggaagaagggggcatttcctgggctttcccaccttcacaggagtctctcccttccgcaggggcccagtcggagcagccaactgctgcctggagccccgtgacgtcaccagctgccgggcggattctctggtgtgagtacccggcgctcccagccctgcgcgcgcctcccgctgcccagctagtgttccaagtccttcgcgggatgctctctcccgcgaatctccacacccccacccctcggtctaccaattttcgtggggctcactgcacccctgcccccccaacccgctgtctccctaaggccatggagcctgcatgtggtacctggttctgggcctgctcctcacctgcctgctgtgcggggtggctgccacctgcctgggagtgcgctgtgagtatggctgcccctggttttccacttacccggaaggaacaacgtgctcccccactttccccaacagctgcccttcctcagcagggcgggagtcactaccaccacagcctcagccttgggctggtttctagccaggtctgttttcagagcgcagtgacttcctagattgtcctggcctaacccagttttaggtggtcagatcttatattccattccagcctattagggcaaacttgcaagaagcagaaaagggactgacgctgaagcctcgggttaccagggcatggctgatgatgtcctgaatctctctttatggccaaacagacttgcaggtgtctcggcagctccagcaaatgaacagggttctggaagccaccaacagcagcctgaggcagcagctgagccagaaaataacccagctggggcagagggaagaggatttgcagggatccaggatgaagctggcccagagtcaggaaacactacaggtggaacagaaggctggccaggctaccagacagcagttgcaggtctgccagtctgacggagagaagacaaaagaggccttgagaaataaggagacagagaggatgaacttggagcagaggctgaacagtatgtgggaaagactacagtctttcttcaggtgctcctccccaggtatctgctctgggaaaggagagatgggagggcctgccatgagggatggactgaagtgaggggtctgtctgtctaccggggtgccattgagttgttcaggaaggggtggtgaaccagagtgctggctgacatggacgggagctgtgcatccttggccagcagggggaaggatctagccacctactggatttagggtttgatccctgggttgggaaggtctcctggagaagggaaaggctacccactccagtattctggcctggagaattccatggactgtatagtccatggggtggcaaagagtcggacatgactgagcaactttcactttcacccagctctaagcggggggtcctcttggggagaagagggtggcagccagcagtgcaaatgatacagagcagcaagctcagggctcatctggctcatctcagggctcagggcatatcagtgtcaaggaaactccctgaatttgggtgtgaaattgattgttcacatgtttttctatagagaggacctatgctgctaagtcacttcagtcgtgtccgactctgtgcgacctcatagacggcagcccaccagactcccctgtccctgggattttccaggcaagagtactggagtgggttgccattgccttctccgagagagaacctatagttctatttaattcttgctatagctgagccccccaaagattaagaattactgatgattgtggtacagtctggagttggggcaaggtagctgaggctgtctcggagagcttggagggcagtgaactagggtggaattgctcatcccttttgaaaggaggagtgcagcagtatgtggggatgaaggagggggacacacagaaggtctgccagagtaggctgaggttgagggagggtcccctgcctgagaggaggggactgcttgtggactggttgtctagaggttaggctctgtctaggtcatgggcatctggatactcccccaaagctttaaacaaagagatcatgtacagacacctgcagccctggtttctttaaccttcttgttctctacaagcctcactttcatgccagtactgcccacccccactgccatctcccatccccacagctgaacctagacctcagcatcccaacccacacttccactgaaaggacggttcagatcttcactgtgaccacaacgggcccccacacttcttcttacagaggccttctacctgctggctcccctgcttcctcccttctcatcagctatcacctgtcttcacttctttctcaacccatcttgatttgagggcctgtccccttacttcagccagccaactcactccttggttccagtgtccttctggtatatctgattgccaatatctcaactctggatgaacacatatgcctgcacccagggatgacaagctgtgcagtcattctgcttggtgccacaaaactctagtctcaacgtctggtgggaccccacactactagctctctgtaccccactaccctctccctcactctcagcagatggccctactctgccagagaggaatttcctgttttccaccaccagttctgtgtatccatttgcatttttgtccatcctcatctcttgcaaggataactgcaacggcttgctgaatgttttctctaaacatccctcctccaaatccacttttcatgttgtagctagggtgatcctttaaaaacaaaaatctgatcatgtcatttcagttaagatcatgtcagttaattaattacatcaaaagttatggaatacatgctctgtgtccagcactgtgcccaggcacttgggatacagccagagaacaaaatgcctcagtgtaaaaccttacattgactttctcgtgctcataatctaaaaataaaaaattctcaatctggtccccactgcccctacctacctttcagtgtgccgctcatcccctcaccctcgttcatttggccacactggcttttatattcctttaagttgctgtagggcagtaactcaagggagtagctgggtggggatgagaaaatatggccagaagagagggaattggaggggaaggaatgattgttggggaggtaggatggatgggacaaagcagcagggagaggtgggttgggatcaggagcacagactggggtgtcggatattaaagaaagagggaggtttacttctgaccaatagtcaggaggagagaaaagagacaaattttgagatggagggaaggaaaatggagagagttcacacgtcaagtgtctgacaacttcaacaaagcaaggttgtcaacttgtggaagactggaggggaagctagtggctagcagcttgaggaatgaagggaagttttgaatatgcgctggggaatgcgttagggagctaatgagacaatgagatgaatgggaggtccgttgatcacttctttactggggacccaggtaaggttaaccaaaatggggggtagactgcaattgttcagaaactggggatagtaccaccagcccttttcaaataagcctcccagattgaaaaaaaaattgattgattgggttttggttgtgctgggtctacattgctgtgtgggctctctctagttgcagagaccggggactatggttcattgcataaccttctcattgccgtgtcttctcttgttgcggggcatgggctctaggtattctcaggcctcagtagttgtagcacgtgggctcagtagttgtgggctcagggcttgtgggctctagggcatggacttagttgttctgtggcatgcagaatcttcccagaccagggattgaacccatgtcccctgcactggcaggcagattcttattcactgtgccaccagggaaatccaaacctcccaggttttaaggagtaaaattgttgaatgttaaaggctttcactaagtatgcacaggtattgcatttccagggtagtcgaagaaaaaaagattacaaagtttaaggaccagtgaaggcattgaggttccactccagggaatattgttagcaaccgggttgctgagcattgagatccccctctggggtctggacagtgcagtgctgtcactctctttctgctttttagatttctgctgtcccctgggatggatacagactgagaggagttgcttttacatctcagttactaagagaaattggatggaaagccaaaaccactgtaaatctctgtcttctgatttggccaaaaccagcaacagttctcatccatatgcagtaagcaaacccctattcaaagactgtagtgggtactgttgggtaaagggacataggtcattgagtcagggatggcactgtgcagcctctcagcacagagctgcaggtggccctacctactgattagggctggcatgagagttgaaacttacaagccgtctttactttaacctgtttctcatcccagctttctggtcagttctgggctgctcaacaggttctttgactctcatggtctcccaggcagacaggttccatacctggtgtactggattgtagggaatggctccttgtgacaagaaccgtccacagaatgactcttcacaggctggcagaaattcttacccagcacgtgcatgtgggtatgcatgcatgcatgtgtaacgaggggtcagcttgtatctgcagggtggcacttgaagggtgcagggatggtcaccgatgaggcgatgtcatgcaccaaggttgggtacagtcctcttgctgaagcttatagcctctctagtatttccttcccctcctcttgacaccccctctctccccctattccaatatttcccagcactcctcacacacttctggtctcttaatctcccttcagagttctcatatttatatcagaaacttacggaaggtggtgccacagggtggttcagctgaatactgggttggccccagaaatccgttctggcagcctgatcatacaagacacacttggtaagtttgttaggactttggggcaacaaaaatgctctataatcccttcataaagacatggtaatgaactctccctccaggtcatcctctcaaaactttggatgttataatagcccatgtgtccatttcttctatttgattagtaactctcagggcaggcaagctctgtattctgtcctcagtacccagcagtccctggcacatgctttacttaaaaaaaaaaaaaaaaaaaaaaggactagtttgggacctatgtcatctttctctcagggggataagttgaggatttagctaggggtcacagctgatgaagaaccttgggtcttctaactttacagccgacaaggctacctaaactgtactttttcagtcaagtccacttggggcaccagggttgccccagagaagtgagaaaggaagtaattggggtaactttgaggaccaaccccagggaccttgaagcagggtagttacctaactgaagtttccatctttgaaaacttgggcattttctccctcccttggtcctatagcctctttgggtcggagtccaaacacctgtccctgaaccctcccacacaaagcaggcagggtgagttaggacttgggttaggtttgttcagggcaagagaagggaggatgggataagaggggccagagcttaaccctgtgctacttcactaccctttaggtattccaatccaaaatgtcccaagctagaaatcaagtggaaggatccggacctgacgacaggggcgtgtcacctttcttttccctacatctgtgagatgtcagctttcaggtctccagtcagggaccactctttgcactgagctgggtaagtgtgggggatgggactgaggcatggagcctgggggcagagggtctcacacagagggcaggaggaaaacttgtttctggaggcagcagccatgtcacagcctccaggggcttggtctgcttatggaagggagggttgggcagggaaggcctggaattgaagggaggctggcgatgcggctgtccaggttgctggggaggaggtggggtgagctggatgaggattctcagtggcagtcaatcgtggagctcaatgatgctttaatcctccaggtactcaacaacaggaccctgtgcccttcagccctaacctgtagcctgcgggtcctaagatctgccttcctccagtgtgtcttcactctgcccagacagggccctgccaagggctgacccaggcccagcatctctaggcaagcctgctggagatcctgtcccagaaactggactgttcccagggaacagggaagaagcttctagaagagattttgccccc

SEQ ID NO: 226 - DNA, 66876 bp, Hippotragus leucophaeus
  source 1..66876: mol_type = genomic DNA
ggagatggagaagaatgatatgtgctctcagcttggttcctgagctgtaagtagacagggaaagttgttataagtccaccacagccactggaataggccaggggagcaatggtaacagcaactgtaaaaaaaaaaaaaaaaaaatccagtcccagcaggaggtgggaggaggcagcctttggccagacatagctcccaggaggaaagccaagctttctctcctgaaagctggcatctctgccattcatcacgttcgggctgactctaggtttccacctgtcagcttctaccagtgcccagaggcttagggatagaccaaatgatttctctagcttcttctgacttagctgtccatgatttggaaagaaacagcagtggtaaagggaggactaagtgtgaactggcttttattttaggcagataaagacttttttttttaattgaatgagtgatgcttgtagttgccaaggccactatgtacagagaagagggggagaactttatttcttggtttcttccttcttggacagagtccttatgatttcctccttggccttgagccgctcttcaaggtgcttgccgccttccttggtcttcaacctgtgggcctcagcctggtccaccagaagcttcttgtaagcctggtctgccttcagcttgcagatatgttccataagaatctgcttgtttttgaacatattacccttcactttaaggtacaggctgtgatacatgtagtggtcaatcttcttaggttcacactatcttctgagaagctggcacagaattctcagcctcctcatccaggttaccttctcatcggagcactggcagtaccctttcccttaactatgcctttgtgcatcccgttccagtgggtcaaggtgtctttccagcatcgagcctgggaatggaccatcatagtcttccagatcatcagcccatctttgatcagcttctagaactggtgatttcattagtcttattggggcctaaccagaccttctttttgccacagcggaggatgctgaaggcaatcctcttctgaagcctgaacacacttttggttgcagccgcagaggcaaaatggtgaactggtgtttctttattccactctgcgtccctcgtaccatgtcccagacactgagcctgcccaaggtgtatgtgtctgtgtgtaaatgacctataggtccccaccacactaaaaaaagaaaaaaaattaaaatgctatgtctcccttactattaaaatgctatttctgccctccacctgtcaccccagaatagaaagctcacttgtcatggaactcagtttcctcagacctcatcagagacactcaacttcacatttccaaggacagccttggctatttatcctctgatacatacccaaaggctgagttttccctttcccattccaggtcccaggtctgtggaaagactgctcacaggctttatccacttcagccttgaagtgtcaaaggggaaatgatttcaaatgcacaagctatgttgccccctgcttcaggatatgggcacttggcgtgatcagttgtgtcccagtctttgtgactcatggagtgtagcctgccagggtcctctacccatgggattttccagacaagaatactgggttgggttgccatttcctgctttaggaatcccaacccagggactggacctgcatctcttgcatttcctgcattggcaggcagattctttatcttcatgacactgctcttgtaacccatgaagcagagttagcagtgaagacctgaattgacccaggctgctccagtgttcttcctgcctctgacatctctctcttggttctgcccacatcgtcttcccagcaacctcagtcaaggtctgagaaagcctgctgtagtagaaagagccctattgtcttgagtcccaagctcttctttgccatttaacagcatgtgagcgtgggaaaatcacttatgagcctcaattttccctgtctatgagatggaagtaatagcaggtgccatgactgaagggttaagaaacttaataatcatgaatataaaacaacactcaggacaccaagaataggctttttcattagttgctaagtgagtacaaagtcagagcacaaagtgttccttttttcaaaaaactttgaattttattggagtatagctgatttacaatgttgtattcagtattctttaatagactaatggttaaacatggtacatctgtggtacttccatatcttgaaataaaataaactactgatacattaaaaaacttggatggatctccagaggattatgctgaatgaaaaaaattcaatccccaaaagttacacagtgtatgattccattttcaaatgacaaaattttagaactggaggatatattaggggttgtcaagggttaagaagggggtgacatagaggcgtgatcattaaaagggtaacatgaatccttgtggtgctggaactgtggtagcagatttaagaatttacagaggtaataaattgcatagaacttaaagtatatacacatatacaggtaaaaccagggaaatatgactaagactggtggattgaaataatggcaatattctggttgtgatgttatgatacagttttacaaaatgttactactgggtgaaagtgggcaaaatgtataagggaaccctctgtattatttttacaactgcaattaccttaatttttaaaaaggatatgatagattattaatgtttctgctgggtataggagagagaagggcctgcccttgtgttcccactgcagaattccaaagaggaagattaaaaaatattattctcattgcatcaataaaatgattataactatggggaatggggtatttgtatctgttgtaccagtaattccactcccttgaatttactttaaaaattacaggcagtttttcacaagaaaaaaagaattctgtaactattatggtgatggatgttaactagactccctgtgatgataattttgcaatatatacaaatattgaaccattatgttgtaacctgaaactaataaaatgttatatatcaattctacctcaataaaacatgaaaaaaaaccacaaagttttatgtggtaggatgttcatcatggtattatctgtaacagtaaacatatctaaatgattaaaatagtggatgagctttataattcatgacatatccaggtgatgaaatggtctatagactataaacatacttaaaaatataatacaccaagaacaatgccaggtagttcttcattttactgagatgttctgggtatttaaaagagctaatataggtaaacgcacttacaaactataaagtgcttggcaagtgctctgagttgctatctttttattttggctgtgctgcacagcatgtaggatcttagttctctgaccagggatggaacacacatgccccctgcagtggaagcatggagtcctaaccactggaccaccagggatttccattcctgtgttgttatcttactggctgtctttcccagctccattctagatgaagttgtacttccaggcaggacaccacctgaagaactcctagctgaagccatgggtatggggaaactgacttcttctggagtgtgactcaaagaactggggctacttcctttccaggacactgccaccctgtttcaaatcatcaataaaactatggacattacccccagcatttgcacaaactcacatttggctataattccaggggattcataagagtctttgaagcaatgtcagccctaacgactctgaaaaagtagtagactctaccgtatcaactgctagtgactgagcacctactcagtatcaggcactttctaaggtactttacacatattatttcactaaatgctcttcaccatcttaaaaggttatctgcatttcacagacaaggaaactaggcctaaaagaggtgaagggatttcccaaggtagcacagctagtcaacagcagcactggcattggagcccaaggctgtcagtccataaacttacagtcttacaaacttacactacacatactaggtttagaactgaggaggaaactgcaccgaggtacatgtctagagaagccccagaaaattacccctgttcttccaatgttccttgggtaaatacagacttaaaaccatccaaggcaaaagaaaagtctctaaagagaagtaggtccattctgaagtcttatatcccatgagtaagtttttccatatatctaacctctatcatctctgctaaaatcctatccctttacctctcgtttccagtggggatggtgaatatatgacatgatgcccctccatgaaaggtcctgggaccagaggggatagaggagtttctctttccccaggactgttgaggccttagttccctgggatcttccccaatgtatcaaaccaaacaatgagcaggagaaaatggattaggaaactagaccaaggagatgagcttggagggtggcctgggactctctcagaaccttagtgctgggctcgggtgaagttaaggtgggctgttttccccaccaggctcagcagccagcttcatgtttgacagctactcagctgtggaggtccagccagcatcgttcatgccagagcctcttgtttgtctcaatatgacatctctatagaaaggaggggtctgggggattctgccactctgcatttattcctcctgtgtcaatactactttgctgtacttgctcaggagcagccagtccactggggagggcggcacttagagatacccagggaagagaataatcttgtgaggagaagcctgggatcctaaggcttttctctcaacatgacagtcaggaaggaaactggggcctgagtccagacacagattgggaagaagaggtggcttccatcacgctgtctttccttccctcctccatgcactgtgctaccctgctgggacctaggcacgcccactgctcactttggcttcccttggcccacctctcttatggacaggagagagttaaagagatggtatgggcaagccataaatttcccatcagtgtggggaggggaggactgttggcagggaggggggtaagctgggaggtggggtggggagagctgggaaaaagccaggaggttgtctctaggtaacaataaacactgcaagcaaggagcagctgttacacttactctccctgcatcacaatgctgaaataacactaataaaccagtgtgcccaatgcacaggcatatacacattcagggccaagttctgctgtacccctagagctgccctttgcttcaggtcaggggccttggtgccagtggacatacttgtcttggccttgctatacttatgtggaagatgaggactggtgagtcagtctcagagccagagtggcattctcaaaagaaggagggtttcagaggctgggtattctgggttcagaaccggagggctttcaccgatgggaagaggtcaaatggggtaaatcttggttgggagttgggaggagcagaggagagtgacagagaaaaagtatagcgaacagacaactacttaccgtgtcttctcagattggagggcatgaggtagccagaagtggagtcagctaaatggaggtggaagttgaaggagggttgaggagaaagaaggtttaagaggtggtattggggagttatccttgtatctcctgaggttgaactccccacacctgcctacacccacctggtgcgccaagcctcccccttacagcaccactttcatagcagagccaggtgatatgtcagttcagttcagggttgagctttattatgggtgttccagcaggggtccctgggtttctgatgctgccaggaagagctgggggagtggaactggtcacatctccctacacaaagagcagctggcctgtccctttgtccaaccaaaactctctggattcccaggagcatcccagcagagggggccctcatctctgctggacagcagagctgccatcagtgacaagaatagaaataggcaaatgaaaacttaggttctctcagagaacacccctccaattcttctctgaggttaggaggaggatgtttattaagtgtctagatacactgttatccaagatccctatttccttttgctgaaacagggaggcccctgggactgtggtcgggggcatggctagttctcctggtcctctttctggccctgtgctgctgatgtgaccttaaacatagtattttatcatccccctgattcagaaagtctggagaagatgcacatcggctacttggcctgtaatggaagagaaaatcagcacctttgaagaccacagcttctgtttccagcaaagaaagtataagaccaagtggtaatcattccaggttctggtcttaaaatagtgccccctacttaaaaaaaaaatttctgagtgtcagctgggtgcccagagctgtggcaggcaagagagggcagggagcagtagctgtgactgcccaggagtgctgagctgcccagcacattaccctgtgtgtagcccagggacacagtagagtaagactaactagcctctcctatcctttcctcactgagaagcctctccctgggaatgctcagcattccctgccatcttctctcccttttccctctcttctttcttagctggggtttctccttgccccacaatccggatgagagacctctatccacagagcacagagttggggagaaatggggcaaaagggagctctaacaggcccggatgccttctcctcttattgttatgagtcaccagaaccttgagctcagctgagctgccagcagccttctccctccctagagccactccagccaggcagacaaggacctacaggacccaagagcccaccatcttcctacttccagggccacagtccccttcttcattcctaggaatctgcaccacagacacactgagatgagttagaaagaagtgtgagaccccaacatgtgctctgtgctgtagcagagagccagctgcctgtacggcagagtaggatcaccagccaggaaacctggcacagcctgggcacagagcctgtcagcatgtgagagggtgcgtgagacaggatgggataaggaggctttttcaggagcaggcatctcctcctggcttcccctctggtcactgtctcttctccttggcttctctccccaggtattgatggacatcatgacactgccacctctgaaatatcttctttcacctcctccgtggctttgggagttaagagaatggtctgcatgataaccttcgaggtgtcaaggtgggaggttcagacatccagctctcttaccaaccagtgggacacactgagggagaaggaggaaaggagccccaacagagtaaaagttaaacctggaccaacacagagtccctcagcaacccctcttctctagagcgcaggggacactgggtactgctacctctgctttcacttacttcaagtctatccctctttccctgcaaaagctcagggttacttctggattccagagcagggtccaggctctgactccaaggctgtagatgtcatacccttggttaaatcttaagagtgtgaggcagggctagtggagattgaggggagggaagtcttgttcccgagagaaacatcaagaatctatcaacaattgaatggtttaagggccttttagctcctccagtatacctctaatcctggagtaggggtagacaaagggtgagaaagaaggccttcagaaagcctgatgcctcttgtctttctccactgaatgctcttccattgctctgtttctctaaataagagccatctaataaatcccctcaacaacactcagtatgaatagcctgctttaagttaggtagcaacaccccacccaaaggtgggactataggcctcagtttccaaattccccctctctatcttccctctttctggcttctccctgacctccaccacacctttccctgcaggttcttggaagcaggggcaatgcaaggcggccttctcatcttgttggtagtagaaagggcagagaatcagacagccaaggagatggccctgagggtctaagaaaagggcagaatgagcctgggggcacttagaaaggcacatctgggtctttcctagggactttgggggatattaaatggtgagtgtactgagatgagaatatatttctgggagtaggggataagtgttgggggcttggagagtgtgacaaagtctctaaaactcacacagctttccaagctttctgcccatccttgtccagacctcaacttagtcccatgaagcacagaacaatgttgaatttttttttaatgttgacttttttaaggaaggaaggagatgccaggaaatggcatctttggcaacgtagtgggcaagtcacttctctccataagtctttcttaactctagcatctgaacagtgaaggaggtgggggtggggacagctggaaacatgcccctctctccagtgttcatcaataccttatagaattggacggggcttcactaagagctttgggccatcagttcagttcagttgctccgactctttgtgaccccatgaattgcagcacaccaggcctccctgtccatcaccaactcccggcgttcactcaaactcacgtccatcgagtcggtgatgccatccagccatctcatcctctgtcgtccccttttcctcctgcccccaatccctcccagcatcagagtcttttccaatgagtcaactcttcgcatgaggtggccaaagtactggagtttagctttagcatcattccttccaaagaacacccagggctgatctcctgtagaatggactggttggatctccttgcagtccaagggactctcaagagtcttctccaacaccacagttcaaaagcatcaattcttcggcactcagctttcttcacagtccaactctcacatccatacatgaccaatggaaaaaccatagccttgactagatagacctttgttggcaaagtatggtgctgcacaaatacaggggcatttctgactcagctttcagagccttaagttttaattctctcttcttggcctagacgtaggacaagaccacgccttgctatattttggggcataattttctctaccagtttttactgcagcagaaaaatttgtcataagatcccagaagaagctcaatatttagtcgccattggggaatctataccttggttaaggaactggggaagttgatgtatttccttccctgtgccttttagaatacagtaaaatctcatgggagtgggtagttctggaggatctgtctacatgaaagcaagggaatggagatgccttctggaacagactgtatgagggaaatgtccccccagtaatgcacccaccttactcccttaagttactttcaaaactcaggggtcagagacaggagactccaagaaacggaaaataatactctgccaaacctttccccttgactttgctcccaataccctacctacctacattttctggtattcccaggaattccccaaatccaggaacaaaagtaactccaggacaagattcaactgtttcccttctctgggtctccgttttcacatctgtaaaacgaatggtttgaaaagatgagctccaagttctcttcctgacaacagtaagggtctatgattcataccccaaggcatcagccctcatttgcatgtaatttccatggcacttatttcatgtctaaacacagagaaatatctctgaacccggccccactcctctctctcaccagattctccagttttttggtccccagctcttatcttcacccttcaaggacctcaaagctctgtcctcaccttcctttcacagttttacagcactcactgggacaagctcaactgcacaaaactcgggaacaagaaaacagccttagctaatattcctggctgcaatatgggggctcagaactgagtcaactggtgaggttccatcctttttgaaggtcctggcagttggggggaaatcccagtgcctctcctcctcctccaccttgctattctccatgccagaacgcaaagtggccagtgattgatgggcctgggttcccagtaaccgcacccagtggcccaatcctcctcccctacccaatctctcccctgtccctattcagagatcagattgtctcatgttggtccccgaggtcccattaattaaaaatacatccaattaaatggcaggtgaaaacgtgctattggagctctccacccccctgccccagcttggtcccccccaccccccttttaaggctcagctgtgctttgagctgagaaaaaaaagagagagagaggaagaaagagggagagagaagaggaagacatagaggtgggggtatgggggaaagctatttgaacctctgccagggtagcatgtgccagcctgggagggtggcactgtgccctggtgtctaatttctggaggtgtgagtaggttcagtcagctgggtacccacttccatttcccttaaaggggcagaggaaagtcaaaggttgcggctagctttactgccctccttctgggttcggtgaatgaaaggtagaagtgtaaatggtagagggcccttaagacagggtgtgatgttcaggggttgcaagaggctgaggcttctattcttggtatactgctcttccctaaactgcaaagaagataacgagaagcatggtgggacccaggtggcaggacatggcagtgctcccaagccaggctgtacctacccctgcccacaggaaagctgagaaaaaaatggagtgaggaaggaaggagccatgatttgggtgggagcagacgagtcaaataggataaaatataccagcatggacatttgtgtgggcagcaccttataagtaagaggctctggagggacctacttgttcgttctctgtacaaaaagacgcagaagtagtacaaagtcacctcaatttggcaggctgtgagtagggcatcttttctccttcacatttatggtgtccccagcattttgtaaggcatctgtcccgtcctccacccctctaaacccttctggccccaagcaaggcaaagttaataggcactgagagctgttgggtgaggagctacgaaaaaaggagtaactaaaagtggtactcagaatccaggcagtactgggagtatctgccaactgagggccccctcctggcctccctggcagtctcagtacctcctcacttcactttaacgctaattggagattttaatctgcactgctgctctgctcggggtgctggggggagcgccagctgtgcagcaattccagcagcaccgactgtttaatcaagctgtcctcctggggagggaccctcgggcatgggggtaggagggaggaggagaacctctgtcatctcccttagcctgttcagcatagaagggcttcctggagactgaggaccaaatgtgggagaccttatccccacaagggctccatggcccttggatccttagtggagccaatacacatatgggagcaccatgaggcttaagggccaaatcagtccccatcccatcctgctttctgacaccttttttggcacagagccccagagtgtcctgggtgtcctttagacatgcaggctgtaaatatctttcagatcatctgagctctgcaggtttgtgctgggagaagtgatgggggcatagaaggttgaactttgctactctctcagtcttctcagtcctctccctttctcttaagagagctaactctttaagagctacttctcttgaaacaactatcataagagacttttgttttttttctctctgaaaacccagatacctccaaactctgggctggaaagtgactgtctagaggctgacgacaggtggagcttgttacactcttaaagaaagaaacacctgtacaaggtgtttggtgcctaaaactaggaggcttcccaggtttgactgggaatctattgacatgtcagtccattagggaagagcattcagggtctcaggccatttttaaaggaagatcaagtgcaagaacaatgaactattcttctggctccttaggcctctgaactcaggctctctgggtatttttctcacctctgtctcagggaaatagtgtggtgccccccctctcccttcacccaaatgctgtctgctaaggggcaggagttttatttaattggtcagcagcgccctcgtgtggcaaaaaccaaggctgtagcaacatccagattgacagaggggtaggcacggtactccaggtacccaatacttccagagacatttcctactttcaaacacctaactctccatccatcccaccgtaactgcctcacctccaattcaaggtatatgcctaccagggaagggggcaccttacccagagctggcatttgcttaggcctactgcttacactgtctggattgcaggggtgaagagccattgctgagagaggagatctaaggtcaaaagggtaagctgatatcaactacaatggcaagagaggctctggaacccttgccaactccctacaggtgccagacaagagctgcctcctgagctggagactgagtattacttactgatgggttctgccctacagtgattcatttgctactccctggatgtgtctggaaatgaacagggacagactcttaagagtctgagatccttgtcctcaggaatggacacaagataagaacctttccctcaaaagattcaagttattccccaaggttccaggccatagggtagaatgcacatctgggacttcaggcttccaaccctaagagaagggctgcctgtcattagaccctaacactatccatttactgttcccttcttccctcacccactaaatgggagaaatggttttgaattacagaagaggatggtatctaacattaggaatgtcgctctaaaaattagggctggaagtcaccaagccagaaagctgagtaaacatggccttccccttgtttggagatatttaacaaaagagagaaatattcccagagagaaatatgatcctgttcggggttggagggtagggagaggagacacctacctcgccagaagaagggtaggggtaggcactgtaggttggtgacctgctcagttctgggcactgaggatgggaataaccaggctggcagacctctacttccggtgtcctgcacagtgtgtggacagggggcatggcccatcaaacctgggaaggatgtggagaaactgatgagaagtagtaaaaagggacatcaatgtcctatcctcagaagaaagagaaaatagctttttagggaaaaagaagtcagggctatgtgtgaatgacatagtgggtgagtgaggcaggtgtagagaggctgagagtaaccaatattagcatcacattattgagtaatagctgaccaatagataagaacagggatgaaatgaccactaatgtcaataaagggggttacccattctagccaggagggaggaactgctaatcagaaggtaggacactggacttccctggtggttcaatggctaagaatctgcctgccaatgcagggcacatgagtttgaaccttggtctgggaggattccacatacggtggggcaaccaagcctgtgtgccacaactaccgagcctgtgctctagagcccacattcccaactagagaggaggcccccaactagagaaatctgatgcacagcaacaaagacccagcacagcaataaataaataaataaaattttattttaaaaagaaggtaggacaccatagtagagtcaaaaaacaaaattaaagatctcctaaggcaatagaaataaaagcaaaaataaacaaatgggacctaatcaaacttataaccttttgcacaacaaaggaaacaataaacaaaatgaaaagacaacctacagactgggagaaaatatttgcaaatgatgtgaccaacaaaggcttaatttccaaaatatacaaacagctcatacaactcagtgacaaaaaaaaaaaacaactcagtccaaaaacgggcagaagacctaaataaccatttctccaaagaagacatatagatggtctactgacatgtctctattgatacatgaaaagatgttcaacatcactaattattagagaaatgcaaatcaaaactacaatgagagactttcctggtggtccagtagttaagaatcggcctgccaatgcaggggtcatgggttcgatccctggtctgggaagattccatataccatggggccattaattaatgtgtcacagctacttaagtcttcatgctctagagcctgtgctctgcaacaagagaagccactgaaatgggaagtctgtgcactgcaactaagagaaactcccactcgccacaactagaggaagcctgtgcgccacaacaaagatccagggtagccaaaaaaaaattaaattaatttttaaaaacctacaatgaggtaccacctcacactggtcagaatgaccatcattaaaaagtctaaaaataacaaattctggagggtgtagagaaaagggaaccctcccaacactgttggtggaaatgtaaattggtgcagccaagatggaaaacagtatggaggttcctttaaaaactaaaaccagagttaccatttgatccagcagtcccattcttgggcatatatccagacaaaactatgatctgaaaagatgcatacacccctataagttcatagtagcactatttacaatagccaacacacggaaacaacctaaatgtctatcaacatatgagtgaataaagaggacgtgggacatatatacaatggaatactgctgctgctgctgctaagtcgcttcagttgtgtccgactctgtgagaccccacagatggcagcccaccaggctcccccgtccctgggattctccgggcaagaacactggagtgggttgccatttccttctccaatgcatgaaagtgaaaagtgaaagtgaagtcactcagtcgtgtccgactcttctcgaccccatggactgcagtccaccaggctcctccatccatgggattctccaggcaagagtactgcagtggggtgccatggaatactactcacccataaaaaagaataaaacgatgccacttgccgtaacatggatggacctagagattatcacactaagcgaagttaagttagaaagagaaagtgaaacactatatgatatcacttatatgtggaatctaaagatatagagtacagacttgtcattgcccaaggggaagggagagagatggattgagagtttgggactagcagatgcaaattgttaaatacagaaggattaaacaagatcctattgcacagtagagggaactatatttaatatcctataataaaccaaaatggataagaattttttaaaaaagctaaggtaactcccctggagatctttgggactaagaacttccctgagactgtatgtgtgtgtatataagtgttaatcccttataaaagcagcccagtgacctctgattagcttaagatccctacctggctcgaaactctgtgaaagagagtgaatttgccaggactccggatgtcaggtaactaatggacattaccaaattcctcaggggccattcctcctcctgctgctgtcacctgtaaaagaaaatgacatgtaacattagacatgagataaggagccagacatcaaaaagggtatatgctctttcactcaaggagcatggccctagtaggtaaagtgatgacgatgatagccactcttctactttacagagctgagaaggattcagatgaaccttaagtacacgcccaaagacagtttagagttttctaagattcctaactccaggcaagtagctcccagtctagtaaagtaaaaactatgcttcctataattaagagagaaattgggaattcaacataaaaggaagctctgaaacccagaattataaagggcaatgaaggttcgatgtgaatgcaaagttaatgcaagaaagtgactcaaaagataactagttttagattagataatcagattgttctgaaggctctcttgtctaaaacatcttcttgaagaaaggctcaggactttctatgagacagaaaggaggtttgtgggacagtagatttgacagtttgggcaggtaggtttgtatattccctatgtagcgatgaatctgcatgggaaccaacttcacatttctcctgggctatcaaccatggtatgatggagaaaatgtaaagatatgtactgggatctatttgtcatcagcaattgaaactcattttgcaaaccccctgcctctctgacctacacctataacctagacctagatctatctctaagttgcctttctcccaagattttgcttccagtttaggaactagttagcattcccctcccggctcagcggctcccagactcacatacccagaaaataagcattggaagggacacctgggagaggtccaaagaggggaagggagtctcagcaccagagtgagatgactttagaaacttccatgcctgtcagcccactgagcacactattcaggactcaggtcactgtggagcacaccaccttccttccgctccaccaaagaagaaaaccaacaatccaaaactaaaaaaataagggagagtagagctcccctcgcccccaattcgcctgtaatctcagagtatcttattttactgagagttctataatcccttctctcattcagcagctccccttagtttcccagcaactgagatgttttctttctcttttccttctgattattttcaatatgctttattataatgcaaaggagcctgagttgaaatttagggtaaattcctcacaaaatctctgaggatcttttcgtactatccaacccctggatgatggctggcaacaagcttcctgaatttggggtaactctgaggcatcaggatctttggttatgacttgccacttgcttcccaacgagccagagttcttgactctaaataaaaattagttgtacaatttgcatgtcattgggtctttgaggtaaaaacatataaagcttcccagtttttctactaagtttttaacctaactttccccctcaatctgtccttcccctcctgacctgcccctcaaatctcacagccttactttcttgaggaagcataggactgtcagaactgatgatcttaaaattggaggctctatactcagtaggttaagatcctagacttttggcttctagtcttggctggctgccgctaactcactgtgagactgcggacaaggcatttcccttccctaagcctcagtttctttctccataaattgggaagttgaattagatggtctttagtttcctttctagctctggtcatctatgattctatcaggaagaagacatactgtccttccatcaggaagtgaaatattcctgcccttcgtacttttgtctcagggctacagcatagagaagctcctccgtagatgcctgccttctcaaactggcttaaattaagggacaaacaagtgagttccagtaggaggccaaacttctttcattatgaagaaatgttaaaaaggtaatctaattctaaccctgaatcttgacaaagcagatgagacaaggcaggtatggggcacaaaaaaagcatgacacccaccctgcccccaacaaacaacttatgactgtttaagagtctgagcacacatttggccttgccctagggaactctatataaccagtgactgcttaagccaatacaactgtgtgtggatggaagaaagcaaggacatgtgtaaatacttccagagcataggtgtagatgtccaatcaatacacatacactcatcctgttctctcttactttaggcctatatgtgctgtttgagaagctattgtgggaggggacaccgcatcctggtctttcccctccccaaagtcagaaaggaagagacagtgaggcaggagctacttggcttcctataaattgttttgtccttcctcacagctgcaatcagaagctaagggctcccgcaggccttgttctgatctgctgcaggcgatggagggtttttgaaaccgagaggacttggcttcagccccgtttcagctgccattggggctggctaatgggctcattctggaagacccccgcctgctgcactaaagagtcccccgctgaccccctccccagtcccaacccaattaataaatgggggctcccactttatggctctgggagaaggaaccagagatacaaatgacccccagggagggagagaaaaaggccttccaagaatcaagccagagaattgtgcatccacaggcacatgctgccacaggctagtcatatcccattttcaaagcattaacggggaagaaactggcaaaaaactgtattttctttcccagatccagagtgggatagcgttcttgaagtctgagggtacaccccaggcatcaactctctttcacctggttctccaatctgaaaaaagcagagtgcaggtgaccatctgggcacatagcacacactcaactattttccaggggctatctctccaactaaactctgcaatactgaacacagacatatcccatcaattatttggttaataaacattttctacttcttaaaaacaaagcagctacctctttccaaaatctcatcaccatgaacagtataaatacgtcctgaggttatcaaccttagcctatcttttttatttctctcctcacatccaaactatcatcaagcctagctaattctactgaccccctccctttcttctccttccccttgtcttacactagttgccgctcttagggccttacatctggacaagaacaataatatcctagtaagtttttctgcttccatgacctagtatagctgcaaaagtcctgaacattgtgttcatctcatcatgctctatttctgttactgcttaccaaatcaaattcaaattcctcattcaggccaccaagattgttccttcatttcctaatattttttcctttattatcctgactactccattcatagccctctgcacaaaacacaaagaaactttctataagctttctctctccaatcaccttcctccctctgtttcatgtcctctatcttcactaccttcaaagaatcttttctggttaactctgcgtttttcccattatttctttgctttgtttccctctgtactaggttattgttttattttataacctgcatcagtgtgttcacttataaacaccaatctctctacttcccactcaagtttaagagtcatctctcactagatccagaagcttccaaagatgagaccctcccataatcttccccagaagttgccctgtactcaggacgtcatccagctaatgatattactgctccccatagaagcaaccctcatggtataactcttggaatatcatatcaaacaactacatcaaatacaaacttatttttgtacaatgtcaactctcaggttgccatatgcaattaccaacactgaacttggtactgagtctttccaaaattacaaattgtttcatgacttcaaagtgtgttgcaaaacaaaacaaaaatattgaaaaaaaaaagtacagtaaccataggacttcatcttcttaatgcatagtatatatactgctttctttgaagcccccttaggatgagaagtcccattttgttccctaaggttaatcctatattctcaggtcatgacctgattttctagaatgcaaatcaatcccagaggcaacagtaaggttgtttcctaccagccttgcctgtagtggtctctgaccatcacatttttagaaggtcccttggaatagagaagttattcatgagtcgtctcaactacttaggaagtacttcctgagaataacctcacttccaaatactgacaccacttcctctggtttagccctgtgtgattttgttgttgtgtgtcactaagtcatatctgactctttgcaactccatggaccacagcacaccaggctcccgtcctgtgtgatttgacaggaaaaagtgacctgctaccttttatctcctacatattgctcagaataataaggacttgccttttatccttttccattctttagcctcaaggtgcttaatagtctagataataaaagcaaaggtactgtgatacctagtatatagtaggttccagacaatgctagtcaccattttctcccttcttactcccaacactttctcagcctttctgggtctgttttttcactgcctaacgatggcactaaactagacaaattaatgcccttttgtagctctagcattatctaactcaaattcatatattctggtttgtttgctcttctatgcatcatcctcacttgtatctaaaatgaaggggagaggaataacattatagtttccaggttgacctaaaacatataaaaccacctgcaggggaatgttagtactccaagaatacaaataattcttagcttggtatatccatataatttcctccttaatcctggaatactctcttgaactatgcagatagcagtgctaagtaaaatgtcctagataaaaattacttgcttaatataatctagtttcccgagtgaaactgtctgcatagcatcccccagtttaagggtttcaggccgatcctccaaccataaaggtaacactactgtaatcaaggggacgctttactctctaatggggcctccttgaaataaactgtgaatctttaatgcaattattccctttcactaccccaaccacaattttacctaccactctcatatcttatctcttctttataagcaattatacactgtttctttctgcagccccactaccagacttctccagttctcccttctttcctttatttccatttccttctcatattgcttcattttatatgagaactttggtcccctaacagaaatcgcaaatactaattcaaggccaaacctagaagctcctgaatttataaaagggatcagactcctaagttttctctagctctctgaattcagcctcttttgtccagtgtcaaaagcaaaaattgcattagccttggtggagagggttatccgtccacaaggtgatcctaaccaagggtgtccctcatcaaacacaagaagagggagcctttccatagacaatccatcagaaaggctcctaaaagacaagacacttagctgggctcttcactttgctctgctacactgtagccttttaaaggtttctccatgctgcttccctcaggggtgattttggacttggataaaatgtccttcactcttttggaactatcaacatgatcttcaagttacaaccataccagagcacaacatccccaaaaccaactattttcaggtccaaaggaacttatgtctaaatgagtttatttcatggttataccttctcattccagagaactattgtgtggctgagggctgcatacggctttattaacaactacccacttcagttcagttcagttcagtcactcagtcatgtccgactctttgcgaccccatgaatcgcagcacgccaggcctccctgtccatcaccaactcccggagttcaatcagactcacgtccatcgagtcagtgatgccatccagccatctcatcctctgtcgtccccttctcctcctgcccccaatccctcctagcatcagagtcttttccaatgagtcaactctttgcatgaggtggccaaaatacccacttagagagtattaaagactaactgcacatctatctctttctttcagccttggactgctaattcttgagataagagatatgagagcaatccagcggtcaagtgttttggcaacctagtgattaatcatcagggcatcaaagcaatcctcatgtgctctctctcctcttctcaccaagctttacttcctagagacaccatctgcaactcagctattagcaaaagcaagtttcagtatataagggaagagaatgaagtgaaggttgaccagttaaagaatctcttgtactccacaacattaagtactgcaataattaaaagctcctttcatagcccttagcaataagttattttgctttttctttcacctttcaccccattaagtttgtctcctgaattgcttctcactacccttcaaaactacaaagcagcaataattctaaattccttgcaggattaagcaatcagtatctctggcaggactaaagcatgagaattgggaagtgagtggagaaaagaaatataggaaatgaagtggatggacaggagatggagagctagctgcacatgagaggtgtggtagagtaccaccagtgattcctttaggtgtcatacttcccccactggcttggagtaaactctcacttgagtttatataggaactatataggctatataggaacactagaaatgccacacctggacagaaaaactaaagtgtccaggaatgctcaccttgcctctcaggacaaccagaagacttagcagttcatttctcctttggaatatttgactatttacttgcttgaggaactccccacatccatttcccctagcccttcaggatgactaagttgtgaacagagaagtaattcaaaaccttaaaaaaaaaaaaaaagtcaagctacggggcaatctttaataacaacgaaaatcccagttcagcccaaagaactgttaacttacttgaggcattaaccttaccacacagttaaggatgcctatcttggaaaagatagtgcctaagaaattcaggtactgaacagtatggttcctacttagaaatagccttgagtgtgatggagaaaaaagtccagcttagataggtcctcagctttcagaccaagaattgaagacggtcattgctacaaaatggaaataatattctctattaggttgaagttcacactcctagtcatgaacttgcagtataaaaagactgaaaacgaattccttttctctggagactaacaagaaacacaagactccaggaactggaacaatcttgagctctccattctccttgggtaaagatatgacagcccacaggcaagggaacatcatacttaaactgtggggattcaaaaatacactggcaatcctcatcaccaccagtttttgaattatatttcttcctaatttccttgttctgctgtactccttaatcttgtgattgcttattccacacacttcctgatacctatgtcccctcttcttgtctcctgatacttttcctgtcctgtctgcttatgtcctaactagcaggacagcagcagacattacaagggaaagtttagtcttctgtatcttaaaccatgacagagaagggaaagcaattttctcctcagttggagacaagaagttttggaaataacaggaattttacccctatcaacaattttgacttacttcctggattggcaatgtatcaggaaatctcaacagagctgggaacactaatccatccccatgctgaccctactcatggtaacacaggaactggtgtggggatgagggtctctgattgaaaagactattttttggtctaaacagcctcataccaacttcttttgatgacggttgagctcaaacccacttacctctcctttcagaaggagtcagggtacatgaagctcaactcttttgacggcctggcaccatcattacttttgtacaatggttttctactttagaaaatcacatcttatggtttcccccaattcttattttctagttcccagtataatgttttgaagcacctcttcaaaccctaagaacttcttcttctggaagtctatgagtctacagagattctgagacaaagcacccctaggataaagtggaggaaaaatgctctttatacatataattagatctgctcaaagggtacaaattaagaagtaaatgcaatggagcaaaagtggtatagtaacaggaaatatttaattttccaatctccactttccatttttataaactgaaagaaaaaatttaatatattacaaaatatctgtacataaacaaagtaaacccaatgggaggcaaaacaaagagagagaaaggaatacagtgtcagtaacctaatcagggagaatgaggtcgcgactgacacttttctgatgcagcattctctctcaaaacctgctggtaaccattttagtactgtaactatatatgcatattacacacacacacacacacacacacacaccaagtggtttgggtgatgtctatggcagaagctaaaagaagtcctacttacaagtttgtgctaactgccctgcttttaaacgtatagatttgatgttttcttcaaattcttatcattccaatggacagctgaagaagaaactaaagaaactgggtcaagcaagtttgttttcaaaaccacaaaaatgatcatggtcaaaccagttttgcctctcacttgtgaacagagccagatttctcatctgttcaaaataatgtgtttcatggacttaatatctcccatgtttcaataatcaaaaccaaaaccacttccgaatataattaatttggtttgtaattttctaatacccaagtagaaattctgccaaacctttacttccatcacatttatagataacacagctgaaaaattaacaaataccttttcttcctccacacaagatattccaggatatttgagtttctttgtccctttgcctttagaaatagtcaaaattgccaaatcttttctttttaaaggttagactcccaaattgggggtgggggttgaaatgggatcatacatacacacaaacacacaccacacacatacacactcaccctattccctaatagaagggataggggaatggagacttaagtatattatttagaatatttggcataattaaaaataagggttggggagggaaaaacattattggtgactgctgataaccaaaatacaattaaaatatatagagattttattcatatttgatggaaaaccaatttttctcactggaaacttttgaaaggatccaggcttaagttctctagtcaaaaatggaagagttgggcccaatgtctttaattcaaatattctaaaatacaaaggcccatgtctgaggactaagaagtcaacagacaaaaggttcagatgaactttaatgcaatttaccaatagcgtgtcagtgagcctagcaaatctaactggactcaccggtttaaaaagccatcaatgccaaaatggctagaagtttctctttttaatcaatgattggccctgagggcaaggccagaccaaaacccagaggataataaagaaatacacacaccagatatctgcctatttcagtaacaggggaaaatagttttcatgtaagtatcagaaaaagattcttctttctttacatttttttttttattaacgcatctctctctcacaagtattgtttattttttaatatatgaacttggcattgaaacataaaactttacttgagttctgtaaactcttctccaagatgctgaaacacattttgccttttctttgtaaaggggggctaacctacatttcacaagcatctaggtctgtgcagataacttctataaatgtgtatgttttaaaaacacattatatgctggtactcacacacaactggaagccagaatgaaaaacctcccaggttatcccaccctgaaagtcttcccctctttcattttctgataataaagcaaaattcttgccatgaagttataatttaaccccttttaccaaaaccaaatctctctagaggaaaatctttaaaagaattgacaggatattcatggtgatatgtgtgtatgtcaatactgttctttcttatgggatactcttttaaaattactttttttaaaaaaggtctcaggtagtgatatatcttcagaaaaatattcaccatatactaagttacatttccatgtattttcaggatgtattttttttcctctttgacaatattacaatgctctgtttcaaagggttttttttacataaaaaaatatgtgtaaacagtatgctaactgatgttactaaccctccaggtatggagggatcatctctaaccctacctcagcagcaatgtcctaggctgtttgcatctacaaatcaacttcaccatcagaacatggtttaaaaaaaaatttttagaattgaagatttacagagaacaatataggagtttgaatttcctttcctttatttcaaaaaaagtaaagaattatcccaggttcttgggcatctcaacaattaattttttttccaaacaaatgcctcaaaaagagagcaatagagagaaagagaaagtctacaaagatgggataaaaaaggtaaagagatgggataaagtctacctacttgcccaagaatgccactttctacaacctgcttcatgtgcagggaggggggtgagggcatgtcttttctcaaagtggagcaaactttaagaatgagcaatttatttggaaaaaaggtatgttcaagatgctcaatgggtaaaaaaaagagttcacttgaaagcaaaaatgtgagatggtggagaggaaggaaacatttatttaaaccagccagtcactctgtttcccttaaagcaaaagcctaagagcagctcaaattctgtgaacactattctcttaaaaaaaaaaaaagaaaccaaaaaacctaaattcaaaagaaaccattaaaaaaaaaaaaaaaaaaaaactttaagaacctctcctgagccatctcaaaactaaaactgtttccttcttctgctcaagaagtgcaggaaatgaactaattaaacatttacttttcaatttaatgaccctctccatattctctacttgtatttactaggtagagttgaagtaaatattctgactatatcccatccaggagaaactggtgccaatatcactattttataagttgcttgctaggagcaagtgagcaaggaatacaacagatagctttgcaatagccaaatacagatgattacctcgctctggcaaattatttcattaaaggttcagaggactggatggaagaaatggatagggaagggatctttcaggactctgaagtctctaggttagtaaggaactcctctccctcttccccctcttggagggactctcgtaggcccccgatacactttgccataagcagaagactgagctgaggccccccagttaaggcttgctcctgagctgctggtcccagtggttcctggccccagctccccatagttttgcaatttggtctctgcatgtaccacagagttgctgcttccctcagccttcaggaatggttgcccgaccactgagtgtaatgctaaggggaccctggcaaaacggaggtcctggtcccctgggaactgcactgaccctgtgccctggtaactgctggactccccaaggtggctcacagagcccgagaaggtcctgttcttcaccagggtctgggccaaagattctgtcaaggctggaccagagttgcgttcatcagtgtcagtggcactgaaccctgtttcaggcccatcagtgtttccgtaagtcctgttaggatggggtcgggtggagtaatccattgatctcaaggcctggtgctcatgtggcaggtggccaggaggctctgcttcaggctgggataaaagttgcagcaaggcggctgtcacggctgggttcaactcctggggggcgctggaaagatcgccttcaaccagagggggtggaggtggcggcggtggaggtccggggggctcagggggcctcttctctggtggaagaatgtgaggaggacatgctgtggaagggttacttcttttaaacaccatcttaaaaatcacatgtgattataaacacaaacacacacacacacactccccaacataaacaaatatcaatacaagtaaccaaatatatataaagcaaaaaaccttgggatcaggaaatcgcaatttataaataaaatcaagcgattaaaagtaaaacagttgcattttggatctaacagctggtgttaaaatcatgtatttcaaacgattgttctgatttttgtctgagatctcctccatttccttccttaaggaactgttctaatatgtaggctgttggtagcctccccacccctttttgctgttggatcaaaacattaatgaaaataaagtaaaaggaagttgagaggaacaatacatatgctgtggtcacatatctaggacataatcttgctgtacaacaggaaactctgtatggacttagctaacacattttacagaatgtttgatgatatcaggttaacacgtaaaataaagctagaagaatatacaggtgagatgaaattagtaaaaacctttcattaccatcatgtatacatatacacttgcttctcccagtttgagctccttctccccataatcacagtctgaggaaaaccaccgtactgtcattcagcttcctatgttacagtaattataaaaagtcactacagcaatgtcatgcagaatgggctgttgataaacatttgtttatcttggagacagtgagaagagtatttagaaatgtattgaactaatactatactctgtctttccaaaggtcttactagaaccattccctagacattttgttacccacaactggattaatttgcctaaccatggcaatcactgtctgataatgcactcctgccaaggcaagagactagaaatgtaaaatggtatgagtttgaggacacacaaaaccaagtagtcagaagcatgcctttagagttgggagttaccttgctgaagaaaaaactgttttgggatatctttcaaatgactgatttttctgttccctaacgaagcatatttttaaatgttcatataatcaattctttattatgagacagtgatataaagtcattactcaggcaagccaaaagtagtttttataattataacaattaggtattttggtagcatatataccacaattatattttgcaaaaacaatcagtaaagtaagcatacccttagtgggcagatgaaagtattctgaaaatactacaaaattgttgagcagtgggaggataaggtcaggtgctatatgtaaatacaattagggtgaccaagagtcccaattgcctgagactgaagaaggttcccaggtttaaaactttggttttaaaaccaggacagtacaaggacaagttgatcatcctatatacagtacccactcaattttttgttaacagactggctggctgactagatggtagagaaagctaaattaaaggatgaaaaattagctatagaaaactcacaacttgaaaagtagacatccaaaaacaggagagctaactggactacaaatatctatagatttcagagtttttcactatcaacactacacatctcactacataagaacatcacagtaccagttattttaaaaagtatttttggtctatacatgaaacggaacaccagtttgtttgtttttttttttaatactaagggcaaacaactttaaaaatgcctaactgcaaaaatggacaaagctaaacttatattcttccatctatactacatttcatatttaacctttgccttttatacaaatagttttagttgtatttcaatagaactaattcttgacctcacattctttcacatttatgagaggaagaaaactatttcaaaatagcaaaggcagactggttgtaaagaactattaaaggctaataaaacatcttaagaattaaaaataaagatcacatttaaaaaaacatagttataagatttaaagtgttaacaatattgccaacccttaacagtctgtaccagtggtgagagggatcaatgaaatatacaaataactgaaaatttcattttagtaattagattcaaccataaccatttctcaacaagtacagaatagctaagtgaagtgaagtcgctcagtcgtgtccgactctttgtgaccccatggactgtagcctaccaggcttctccgtccgtgggattttccaggcaagaatactggagtgggttaccatttccttctccacagaatagctaaatagtagccaaagtgatagatttttactttctctggctaactcagtctgccctctggtggaagtgctgatgaacagcaaagcagccacataagaggtagcaggagcaagatagaggcacaggagagtcaccaactggataatccggaagtgaccggaataattagggatggcatttttactctcctctgaaaagtaaatccagtaatttctggccatgagctaggcctaaactttagttcatcttcaccatttggctgatagcttgttgacgtaattattgggtgaatttctttcagtcactatgccacttaacttgaataacttctttcagttattgatcataattttttttttttttggttggtgaaggggtgggtggtggtacaagggaggagagtatgagagatgagacaaagagacctgctttaattctagatttgctttctctgttattccacatcccagagtctcttaaaaactattggaattgttatgacaaaagagcaaagtgaattaagaaacacattaattaagaaagtacaggaattctagttctgcctctgccaataatatggtgccagtagtgggaccatagataggtttatttaaattccctagattgcagtttccttatccacaaagtaaagagggtaatttatttatctttttaaaaaaaatttacatacaataacttatttgatcctgtaccagtggaaataaggcatatactctgcaccaaccgatttgaaatgtgaatacaacaccctaaaaattgaagattagtgtactccaacagcccttgtacatcttctcatttccccaattcatggggtcttcatggacagcaaaaatttccaaggagttgaaaacacttacaaataagtaaagattttagaaataaagactgtgaatcagaatggactagaaaatttaaacttcttttccctctaataaattgcatgctgtgcttatgtaagatcaagttatacatatttccttttttcgatttttaaaaaataataatgttcagttcctaatctggggtccattcacttatccttcaggaacacagatttaaatcatctttatatgctattttttggaaaggaaatgtatggtgttaattacctgcttagaaatcttctcaaatcattctttgggagattaacaatgatattttattagggctttcttgactgtatgtttccaggaactcagtacctagcatccactgttctagagtacaagtggctatttgtacaatctgataatggtttgcttggaaggcagattttcaagtgctagtactagctgaccaccacacacacagtggttcaagatgcatcactagctacggctgtggtttttttgtgtgagaacacagggactttacttacctacttcctaggaaatggaaaaatggaaaaacaatcagtatacgaaaggtgctttaagaagctttgagacttaaataaaagaagttgggcaagaaatacatcacttggtgctatgttcttctgtagactaagttacagaaaaactgaaactgaggccactgatgtgaaaaagaaaacattagagacttttaagaggatcaacagcacctgagctcaatgagattcatgaccggtctgtttacctgctgcctcctcctgtggcattgtgggagttcttcggggcccctgtggcccactgttcttgtcactgttgctttcctccaggttgcctgctggctcctgggttttcatcagttgactcaaaagaactgccaacatattctgcatgtcagctggtgtgcttgaagcttcaggggttgtctgttctgctgaaggtgggaccactggggcaggggctatctccttcaaagattcctctggggctgtgggctctgagtcctgctgttgggaagtggcagccgttagggcactgatggattggttcagggcctccagctgctgttgcatctctgggttggagtggatgttaagcagctgtgccatttgaggaatgctcaggtccgtttggctctgcagcaggttcagtaacactgccaattcactttgattcaactgctgtgtgatatcaccgaggcctgtggagagacagtggaaccaatataagaggatgaggcgaggcaaggcaaggacctttgccatcttcaactgacaatagcaacttacaatatccaatgaatgaagtttcattttgaatgtctcatttttcatgcctccaattgtgacacatttgttactctttatattttcacttaaaaatacagggactaattaaaatatctctgtattgtgagtaaaagtgactttatctatattcttcaaggtcagtgattttcagcccttactgtacattaggagagatttaaaattcagaagccttaggtcctatccctagaaatctggcaattgttcagaggtgtttatgtttaaagctttttaggtgattataatgtgtagccagtgttgaaagccactgttttaaatagacaatgaaggaaaagtgagccaaggaaggaagttgtaattcagaaaaaacagttgtaccacaggagagctactttgttgtttataaaaattcattattacacagttttggatatatttagatcaaataacagtccacagaactaactacatttagcgactgtgatttaacatgattaaattctaaggtcttatcaaatctaacacagacagggctctaattatatgttagtgagccacaggtaaactaatctttaaattcagcttacctaattcactaatttatgccacacactgaactgagatattagttttcaggatagggaaataatctattttaagttttctagaccacatgtacaaaactgggcttatctccctttccccttacataatgaggataccaaactctctactaatttttcagtggctaaaaactgaaacacacacacagatacaaatccttacacttgaccttcaaaatctgccaagtgcttaataaaagcacaaaggctccttcccagcactgacctattgcatccccagccccaggttccaccttgccaggagcaggctgaggtggtgctgggctgctgttctttacaggctcagcacttgtccctgagatagtttcttttcgagaggctttgggtggaggtggctcttctaccaaaacaccactttgtcgctgccgtcgccgtttcttactccataattcatggcaatcctgccagtgggggaggctggaaaaagacaaaaggggaaatgtgtgtgggaatgtgcactactgagtgaatggaggaacaagaaattaaaatgggaaggcaaagagcaaggggaaatggaaaggataaagaaaatataaaaataaccagaaaaattagtaaacagcagcagcgtaaatagaatcatggcatatggtagtctgaggaactaaagatccaaatgcccaaaggatttctttctacagtgagaaatgaagatcttgctaataacagagacacacctgctctataaaaatgtccatattccagtcaaatgattaagttttataattgtttgtgcttagcataacaaaaattaaggagactttttttttcttggtcaaattttaatagggaataaacagaacaaaggtgactgccttcttaatatttacaaaaagcccaggcaaggtagtaatttaaatcttggaaccacatgagcacattgtaattaaaccatctttgtgtaaaatcagtttatgtgttactcggtctctaaggaccaaaaaactggttcttttttctttctgcccactgaatttctatgaccaaatattttcatttgtgaggtttaatacatttctggactttccaatactcaataaattccagtaagttaaatcttaccacaacacagattaccacagccaaaatttccaatttttgctaaaaagcttacatacttcagccacattcaatgcatcaaaattcaaacacaataaatgaattaggacatttctttggattatcagatttgtagttattacctgttcatatactaacatctcatacatttaagatacagtgttcctataagaaaaaaatgcccgtaaactctgaggtgaaagttataatgctgtcagtgaaagtccaaaggtttctatcagaatgtgagatggggagtgtagaacctctgaggatcccatataatagagaaaattaataaaattctgatagaagaaagacacattcagagaccatgttttctatataaaaattcaggacatatggcctgacagatagacacactactggttcgatccctggtcagaaaactagatctcacatgccacagccaggagttctcatgccacaactaaagatcccacatgccacaactaagacctggtgcagccaaacaaataaatattaaaaaaaataaatacataaaattaggactgttcttgcacatacgggataacatgatcattgcagatataaggaattaaaaaagatgaaatgtttaaaaacccctctatttggttggccactgcagcttcttttttaaaaaatctattatttttagtttctcaggtttagagtcactataaggccactagcacttactctggaggatccattttgctgagctcaacatctttaaggaaatcactctgtagagtctgttcagctgtacaacgtttgctaggatctaacgtcagcatgtggtcaagtaaatcaagtgctgctgaaggaatgctgtggaaaggaagagcaaaagaacaagttcacaatgactccagttcttaagcctgtaacttaatgccaaaggtctctaaatttccaactccatgtaaaaaccatgggaagggagttggaacctggctaaacaagaaagcagatttgcttccacacaggattcaagaaatgcaatagtaccacaggtagaaaacatgaagccttgaatgcaagactatgatgaaactcataatgctcaaaaataaaatgttttcctacagtgtgttggcataataaactgggatagtactaattccccaggacaggaaaaagctaagtccaaacaacagccaaacacataaacaaacagatgtacatatttgtcaaactcacaaagagaattcttctcgtaggcgccttctatattgcttcttcggtttcattgtattgaagtagggcagcttgataacatcaggccacacagctggacaagggctaccacagagtcgactgaaaacaaagcaaaaagcaagaacaaggaagtgagtgagcattataaattttagcaattctagaagcagaaatgattacctgctcaggtatgggggctttcggcttattaaactaaaaggcatgcagagaggtaaaacctgaccttactgctttaaggacagaggagttggttaaaaaatagcaatgagaaaatactggcacaatagtctaaaatgattcacatatttggctttgtaaaacatgttcttaatgtcccacatagattttcattaccagttttgttctgttcagttagcattaatttcaaagagctgaactggtcctataacgtccttgttgaactagaagaggagagcttaagactggaattctgatggaaaactgagtttattgcataacacataatgggttatacaccaccttttaaaaaaagtgtatattagcttgtcatattcttccctttaatcttattgcaaaacaaaaaacaaaattcaaattccatcccaatcccagaccttacccaaaccctctattaaaggctctcttttataactatctgtttacatgatgcatcacttactaaactctgagttctttgaaggcagggacctatttctgaatcctaaagttaaacagtgataggaatttgttagagaataggctcaatgaatgtttgccgaataaagttgatcttaatctaacctaagtaagaataaacaactactctgaaaacagcatgcatttacatgaagaactaataaaaactatgcaaattaagtaactgaaatacacttacttatatatataagtatgtgtgtatgtatatatatacatatatatatatatatacatacacacatacatacacactttttgtatacagcccatgacaaaatatatggtaaacctgactgaagagaagcttacttggacataaggagcataaaatcatttagtagaatgaatgaaaagtattagaaattagaggatgagattactgatcaaccttgggcactcagagcacatacacagctgtacctgatcagttctagctgagccagttccagattggcttgaaaaataggcttctttgtgaatagttccccaagaatgcatctagaaagaataaaattgagaggtcagaagagaaatccctggaacttatttaaagtgtatttcaataaacttttatagtatatcaggttgcatctaatataataaaaaagcccaaaactaagggcctgactttcataaaagaaaatacttcttatggtgaaaataatattaaagattaagatttgctggtagatcaaatttttgccacctataaaagacagtctataagcagaaacaagaagtcaagggactttcctggtagtccagtggttaagactctgtgcttccaatgcagggggaatgtgcttaatccctggtgggggaactaagatcctacgtgtcacatagtgtggcaaaaaaataaagaaaaaaggagtcaagagtccttttctaccaattccactgtaaatttaaggaaatagctaaacactaaaaaactcctgacttcaattttacaaagatgctgagcaattccagtaagaataatattagcctttttcttcatctgctctgcagaatgggcactatatacagccctcttgacattatatttgtaaagttcattgtcatcagttagaatcagtttcaacaggactttcaaatatattatgcttcaattctttcaccattttgaaaaggccttacaaaactatattgacgtatttacacagtctccaagtatctctcaataaattaaaattataaaaggaaaactagtaactatttagtagtgaagaaaacaacaccttagctaagtgaccaaagtaacatccccagaaaaaggtaagcagggttcatgtgagtacaaatgtaataccttaaaaagaacacttctgaaatatgaaagaatgaaattctgccatctgcaacatggatggacctagagggtattatgcttaagtgaaataattcagataaatacagtatattaccatttatatgcataatctaaaaaataaaacgaatgaaagaatgtaacaaagcagaaacaaactcacagatatagggaaaaaactaatgattaccagtggggagaaggaactggaaaagagcaatctaggggtaggggactatgtataaaataaataagctacaaggacaggaatacagtcaatattttacagtaacttgaaatggaatataatctacaaaaattctgaatcattatgttgtatacctgaaactaatattttaaattaacaaaacttaaaatttcagccaaaatcaaaaccgaaaaaaagccaagtaactgttccagattaagaatgaaaactaaatgtaatatgtgctactaaactggatcctctattacatgagatattgttgccaggaccttatgagtgtactgacaaaattagtgtgtgaatatacagaactactggagaaggaaatggcaacccattacagtgttcttccctgggaaataccaaggacagaggagcctggcgggctacagtctgtggggtcacaagagttagacatgatttagcaactacaccaccaccactaccatataaaattactttcaaatggttctggaaaaaagatatatatatagtacacatatacaaacatacattttattctatgaatatactgtatattacatataagtacatatatatattatatatacatacaacacacatatatgtgtataaaatatatgaatataaaagaaatgtagggcttccctggtggctcagtggcaaaaaaatctgcctgctgatcaacgcaggagacacaggttcaatttctgatctgagaagatcccacatgctgcagagcaactaagcccttgcaccacaatcattgacactgtgctctagagtctgggagccgcaagtactgaagcccatgcatctagagaccatgctctgcaacaagagaaaccaccacaatgagaagcctgagcactgcaactagagactagcccccgctagtcacaactagagaaaagcccatgcaccaagaagtcccagcacagccaaaaataaataaataaaattatttaaagaaggtaatgtggcaagttaaaaatcagtaaaactaacataaataatcttaaaataattatgttgagtaaaagctgccaatgtgaaaaaagaacatgtacattatgcttctgtttaccacaaaattctagaaatataaagcaatctaaagagcgagcagaagagtgggtgtggggaatgggatgatgtggacagtaaagagggattacaaaggaacatatggataattttgcagcacattactttggttgtggtgatgattttaccaatgtcaaaacttaaattatacacgttaaatatatgcagtttacatcaacactctatacttttttatacctgaaatatttttttcaaaatgtgaggaaagaaaaaaaaaaaaggacaacaaatctcttttctggcctgtgttctgaaatgagatttatttacaaatactcctgaaaccagtgtttacagtcagccctccatatctgtaggtaccatatccacagattaaaccaaccatgaactgaaaatattcagaaaataaattccagaaagtttcaaaaaatcaaaacttaaatttgccacgctggcaactattggagcatttacagtgtttaggtattataagtaatcagagattattgaaaatatagtggaggtatgtgggagggtgtgtgtaggttatatgtaaacattacactatttaatataacacacttgagcatcttgtaaacactacactatttaatataacacacttgagcatccccaggattttgcgtgcagggggtcctagaaccaaccctgctgtgggcatggaaggacgactataatacagtttaactttgaaattctttagcttgacaaaatttgagaaagcaaacaaatgtagcttttaaagttagcagcaactttcttttagcatctgttaacctcaaattcttacttccaatagtctctcaaaccttatccagagaaagaaaagcgtaagcaaaatttgtttctaatattaactgccaaatcaaattccaaatacagtgttatcacaacaggtagaataaaacacagaaagaacagtgctgctgagtttacagactctaggtacaatgtgttgtactagtctgtgtggtttctcccttgattttcatcctgaactgctctgctccatcaattaattctgccaagaacatcccacaaaaacatcttcagagagactactatgatcaccaaagtattaagtgcacatcaaaagtcaagcaaaatctcagttcaatgagtcactgagcttttaaagaaagcataattttctacaattttaattttcaactgtgtttttgtgttttcagtttctagtccttcagtgaggaagacactgttatgtaatcaacacttggctactgcattgaggtggtagattgcacagaaataataccaacagagctatgaactttccccgtgcatcttaatggggcattaactttacagcctagctgtgacaatttaaaagctaatactgttaaagcaaatagtccagaacacaaacatactcagcttgagtcagtaaaatttaactaaagcttcatttgagttgggtaggctactacagaaattaagctctttctccatcacccttttcaattttgaaataaaagccccgtagttctcctttgaaagaatgacattaatagaggagagaaaggatggaaaaaagtgatatgctccctgtttagtatatgtgtcagaatcctaaagtatggaggtcaaggtcagtgtgcataaataatacagcttaagaaacaactaacatgacccatttaaaatgtctatgcccctaacatacaaactgtggtctctaaatataattttctactaaaaggacaccttaagagaaatggccaattccaggtctgtggcaggaaatgaactagatgagactagaaccagaaaacaatagaggctatcaattccactatggttgagtcaaaaggtcccaagaattaacctgaataaactcccaatgactgaagtctggacagtttgaagaggaataaggatgataactctaatgaattaaatatgtttaaatccatgagttcataatgacactaaaaaccaaaccccaaacaacgtcttctttggtcatctttggaggataacagtaagctaccttattattttgaaaactggtaaataaaatggaagatttaaaccgttaataaaaccctttaaaaaacttccttttggccccacccaggtggaatttcagctccccaactaggggctgaacccatgctctcaccagtgaaaatgtgtagtcttaaccactggactgccaggtaacttcctaattaagccttttcaatatcatttgtacccaaggttagccaaatagataacctttctttattccaagaaagaatgaaatgattagaatatcataccacaaaaatcccaaatgaattgatggatgcagaccactaatagctaacaacacttccaaacgagacaattacatattattacataaagtggtgtgtgtatatgtaactccactccaatagggatgactattttattagacattgtttagaagagcctgtgtaagaggataataaaagttgactaatttgcaatggattttttaaaattgtttttaaattttctacagataatgcacccagttattgcctgtatgtactctggacaagaggctcccaccgcttcctacccccaactaggatatacaagtaactatgtgatctgtcagaagtacataaaaccaccggtaaaatagtttcagggtcagtgggtattgggaatcagacctgaactcacctataatttataggaaataaaaatagagaactatgcaaaaaaaaatcaccatgaagatgcaataatcagcaaagtctagatggtgagaaactctataggacaagtaaaccaatttcttctaaaaaaaaaaagttataaggaggggggacctaagagagatggaggggaaatctataattaaaagatgagatatcaattgcaatctatgaatcttataaactatgtgtctgatattaagaaatatttcacatatttctttgaactctggctaaaagttgatccctatccttttgaacttaaagaagagctgcaaaaaaatgaatggagagataaaacatgatacaagttcatcagtatgtgagttacaaacaaaaaaaagatgaaaggaatcttacccacagctccaaacatctatcgctggtgtataacgctcctctcccagcagaagttctggaggtcggtaccacagagtaataactttgtttgtataaggacggctgaaaagtaaaatacaaccatgacataaatttataatggtttctgatgaaaaatacttatataattaaatgcaaattaaaacagctgtcaattggagatgggatcatcaaaacagctccatagcaacctaacagttcaaaagtaaactggacagaagatgatgaagaaataacttccattccaatttgggttgatttatttcagtctaaagcaggttcaaaaattcagaaagaattaagtgtctaaaatctaggtggtaacacatttagaaaatcatggaactcttcagttactgcaatttacagaatactagcatatccaagaataaaaaggactttttcctatttcccatatgtaattttgatgaatgactcacctctcttcagaattatagagccgagcaagtccaaaatctgctagtttgatctgaccactgtaaaacaaaaataattattttcataagtaacaacaggagcttccaaattacacttaaaaagtcaagtgctggaacttccctgacagtccagcggttaagactcggagtttctgcttcagggggcgtaggttcaattcctgatcggggaactaagatcccacatgcaacaagatgagaccaaaaatataaaagttaagtgctaatttaggaattaaaggaattacaaaaatgaattttaaccttttagttctgctcttaatggtaactctcccagattaagtttctttgaccacaccactctggaaagcctaagggaggtttttttaagactactattatgtttttggatttgattccttaactaaatatttcttttatttcttggcaacaaaagtgactagaacctgctagattaaacacttatggttgggaaaaaattaaatgggctatttcagattaagggagatttatgaggcctaacaactaaatccaattcaaaatccctgactgattttggtttgaacaaattagctccacaaaagactatttttttattctggccacgccatggggcttgctggatcttagttccccaaccagggattgaatctgggcaacaacagcaaaagtgccaagtcctaaccactggacttccaggaaatccctacaaaagatatttttgacataactgaaaaaatataaaatatggactgttagaaaataatatataataattttgtcagagatttagagtcaaacacactgatgtaatttactttaaaataagtatggcagaaaaataagggagcaactacaccaaaatgttaattgttatataatgttaatgttaaagagaccacatccatgtttcactctgctaaatatccttcctttgacattgaatcaagtaatattttaataaaatgcaacacaaaattctgggaaactatttaaaccataattaactattggattaagcatacctatctcaatttttgtgtacagtttgtgttacctcttggggaatgaaaagccagttgactttttaaaggactggggatatctcaggtgtttgatagctcagatctagcagaaaaatgagacagaagaggggggaaaaggctattctatgaggtgctcctcaaaatctgagcaataggacaaaatattaaagccaggtaactgctagcaacaaaattttacattaaatcaactcaacattcctagaaaagattatgggcaccttacccacttgtcccatacctcatcacattttaagttcaatttataagcaatttttgagaaaagcaaaaaggaaagaaatagctgtcttgagtcctatattgagacaaaaagtgttcctcaaattccttggcatccttactttgaccccaagactcaaggtaagttctattatggtacgacttaaaagttaaaatggcaatagaggcactatctcggtgatccagtggtttaagaatcagcctgccaatgcagggaacatgggtttaatacttgctctgggatgattccatttgcagcagagcaactaagcctgtgcaccacaactactaagcccacactccgcaaccagagaagccaccacagtgagaagcctgcacagcgcagctagatagtagccactgcacactgcaactagagaaagtccaggtgtagcaacaaagacccagtacagctaaataaatgaataaaatcaacaattaattaaatgtaaataaataaaaaatttaaaaagatggtggaaatgataaaatgtattaaaaaaaaaaagcagtagatatatggaaatggaaaattaggctagacctaaatattaccagaacctagtttatttcctaatccatccccacaccctcttactctcagtagataaccttcttcactgaaaacagatgtcatctgttaggtgggagctatttaacattgttttacctatacttatttacacctctaaccttgctttctccttttccttcagttacagaaaaaatgtgtctatctcttttcctgttcaaggataatccataccaccacctctggctttgatgccatctcctctagaatctcattcctttaaattactttggttctttcctgaatcatcaactttcccctctttattgactttcattttccttagcatttaaatatgctcaaagctctgcatccttaataaaaaattaacaaaaacaattaaagtcacaactacaatcacctccccattaattatgctacccacccacttaccccacactttcaccactgaccttttttattttcagattctcttcttgggtcctaaaacctatttacatcacctgacatctataaccactcatttcttaaacctgctaattttgcattcatgatatttccttattttcttctgatctatctgaccagtttctcaggtttcatcttctcatatcttttctatgcttggtaactcctgaatctacactgctagtttgaaactcgcatgtgatcatatgcctacttggtatcactaccctggatatattatagtaccctggatatattatagtaccctgaatatattatagtatggggtttcccctttcacctcacgcatcctattcttcctgtattccctatattgaccactgtgccgcccatctagatagtttctcaagtgagaaatctgtgagtacactgattgattccccaccattcactctctcaagtctactgatctaccaagtccatgctgtccatcctctactagcaatgccttggttagtttaagttcagaccatttcttacgacgtttttaataagtctgtgtgcccccagtccacaccctatatagtgaccattcagtgacttttctaaagcagaagactaattggtctctcttatatctaaaataatttggtttcatttatagttgtgtaattaagataaacatcacgaagcccaaaccccctctcctccctctctcatcaactgttttccctccttcatccagctgaggactcctctctctactccatctcactcaaaagtctctgtgtagacactaaatgggcaagagcagaggctggttggatcagactagactatgagactcctgcagcctgcttagaaaactgaaaagaaaattcactttagtctagaagctcaccagcttcctgaactcgggaagtcagggacagagaggggctggacccaccagaatggacaccaagcaggactgcaattatttcctggcctgacatcccccaacagaagagcaagaggaatagaagaaagtatattaaaattatagtccagaaaactgaaagatgataaccatcatcattaaagtttttgatgcattattactgtatatatagctggtttttaagtgcagctttaataagaactgtggtgggtcacagatatagtgatagaaaggaatcttttaatatcacgttttatctcataaaggtatttaagtataaataatagttttacagtaatttgggcaattaatgaaatgcattaattatataatttgaaaacaaaaaattaaccagcacctcttaatggctgtctcttataaataaaatttaaattggctcctgcaactgtccagcttcatctcgccattatgtgtttcactcttcttgccctagcaatactgactcctttttcagtttttcaaacatgctatgttattttcacatttatgtgcttttgtaaattttgtgaatttgtaaattcaatctcttttgcctagaaatgtaaccctctgttgtcattctttctggtaaattcctgttcattccttgaaatcacatattcccagatgctcccaaatctgggggtcacatctgggggagtttaataaatgtttacagaaataagcaatttatttgttcagcttccctactaaatgcaactctccagggaccaaccatccaacatgggactttaggtgctaaaaccaggacagttctgggcaaccctgaagagttggctacccaattccacaaagataggaaacatgtcacagtcattctatatttccatctattaatagataatgtttgttaaacagaactgaacagaaatatttaatacaaagggtgcatcagacaagttcagttcagttcagtcgctcagttgtgtacgactctttgcgaccccaggaactgcagcacactaggcctcccggtccatcaccaactcccagagtttacccaaactcatgtccattgagtcagtgatgccatccaaccatcgcatcctctgtcgtccccttctcctcctgccctcaatctttcccagcatcagggtcttttcataggagtcagctcttcgcatcaggtggcccaagtattggagttacagcttcaacatcagtccttccaatgaaaacccaggactgatctcctttaggatggattggctggatctccttgcatcagacaaagatggttataaacagcctaattacctacagaaccaacactggccttatttcaatggttccagacttgctttttattcctcaatatgtagggctattactcaaggctactgtgagtaacaaaggatatcaccaattcactttaagcaaatagccaaagaggaaggaagcagatgataaaaacttctgaaggattaacactgttctttaccaaattcctgtctatactattaaaacccaggagtaagtgctggcagtggaagagaaggggatgacagaggatgagatggtgggatggcatcaccgactctatggacatgagtttgggtgaactctgggagttggtgacagacaggaacgcctggcgtgctgcaattcatggggttgcaaagagtcggacatgactgagcgactgaactgaagtgctggcagaaaggtcagtccccaaatacatctgtatttactctgaaatctgataactaagaaagtctcaaaagcagctataagagcaggtttctctcaatgaaacaaaggagaatttctttaactcaatgtgtgtgggaatttgcctaggaccacaaaagtattactaactatggcaaccatctctgaatattcctgtaggatgtgagtgattccctaaaatgtttccatttaaaaaaacctttacaaataaaattaaaaatacctttataatcctatctcctttagccccttaccaagactgagtctgagactctgctgataaaagtatcccatcacaagttgttcctaaggtacagacatcagatgtacataaacacaaacactgcattattgggtctatctataactctttaattaattagctgaaactaagggtgtcatggacggaggaacctggtaagctgtagtccatggggttgctaagagtcggacacgactgagcgacttcactttgacttttcactttcatgcattggagaaggaaatggcaacccactccagtattcttgcctagagaatcccagggatgggggagcctggtgggctgctgtctatggggtcgcacagagtcggacacgactgaagtgacttagcagcagcagcagcagcagaagggtgtcagaagagagggagaaaatgcttaacctcatatggttactatgttacctgttgttcagcaaaatgttagaacacttaatatcccgatgcaggaaattctttttgtgacagtaatccaatccttccattagctgtttcatgaatgacttgatatggtcctcagaaaagtgcaccaaaccagattccagaagtcccattaaatcatggtccatatattcaaatacaaggtaaaaggctcctacataggatgaaagaaaaaatttagaaaagagaaaaaggatgctgaaataacgatgccttaatttttatataattttggagttgaccataagctctctagaaaaagatgtttaattctatatatgaaaaaactaaaactccagcaattgaataacttgcccattttaataataaataacaaaactactatttgaattaatcttctgacccacagtctggtgctctttggactacttatatcttgaaggggacaactcccccagttaggttgtataactagtcttttatgatctaaatcagctggcaaattacagactgcttggggcaaatcccttctgtctactgctgtaaataaaagttttatttgtaacacacaaccatgcccatttgttacacactgtctgagactacttttgcagaagtctttacagaagtgctaacagcactcacataatatgccaggggtgcatttagtacagactattaatgaaatttatagtatttaagaattgaaagaaaaatgaatcattcaattcaacatcctacatttaaaagtaggtaaaaggctaagagaatccacattatctttacactttcagcatggtgcatgatagaggcaaattctgtaacataagaaacactagaccttctatccagtctaaaattcttctctcagtaacataaaggcatggattcttagtctagagggtaggcttcaaggactctgaaatagcatataacattttaaatgttttttttgaagaatgaatccatgagctattttaaaaggtccatgactgtcaaaaagttaacaaccactggattaaaggtataccttagctttagttaagccctcctacaaaaaaagaaaactaaaattgcaaaagaggagtggataaaggatataaagggacaactcaagaaagagaaaaataagcaaaattcatagacaagggaaaaaactggaatgcaatccaaaataatggtatcactcatacttcacctcagatgacagttttttaaaaagataaattcaacattatggaggattgagtgagatgggactcactggtgggacataaattattacacagtctacaattaaatatgaaaattcctttcaccaaataattctatttctaggaaactatattaagaaataaatcaaaatgcaaagatttatgcaaagatgctcaatgcagtgctattataatattttttttaactgacaactaattgctcaacaaggactgatgaaattaaatttggattcatttatcttcacgtacagtcattaaaacatgttaatgatacaggaaattgctaatgacaagttataaaacactaaatacaccttgatctcagttatgttaaaataaatacaatatctatgaagcaccagaaagaaatatgccaaaatattaatactatatagtgatcttctatggatggtagtatactggatgggagtggcaaagaagtgattgccattttccttttcttattcatctatattttcatttcttccatataggtatgcatcacatccattaattcacttatttttttgtaattaaaaagaaatgtattttttggccattccgcacagcatgttagtttctctgaccatggattgaacctgtgcccacttcagtgaaagcatggagtcccaaggaagtcctcaattattttatgatttttttttttaagaaaaagaatttgaacagtatatagtaaattacttatacagtacagaatgatatggataaaagcaagcacccgtccaaaagcaaccaattaacattttcttatgcatctttactctatattatttttataatcagaaaaggttaaaaaacacacccagaaataaacctagtatacttaattctattccaatctaactttcataaatttatctaagcagaatttccttttctttaaaactacttctatcaaactcaagagatactactcccttaatgctaatatctctgaggctctgtaaagaagtccaacttaactttaaccaatacccttctaattttatgtacttcaatcatattttctcttaatatcccagggtatattcacatatgccatctctttacagctgcccatttccaaaccttcagatttattttaacagaagttggctggatgtcatagatagactacaacaattttattgcccaaagacaagttacaaatccaggaaaaccacaatgtgacctgaagaaaattgttttagaaatacctgcttttaaactgtgagcacaaaactacgtttaaaaaaaaaaaagatgcatataaatgaaggagggcttcccagtagctcagccagtaaagaatccgcctgcaatgcaagagaccccagttctgggtcgggaagatcccctggagaagggctaggctacccactccagtattcctgggcctccctggtggcttcagatggtaaagaatctgcctgcaatgtgggagacctggatttaaaccctggattgggaagatcccctggaggagggcatggcaacccactccagtattcttgcctggagaatccccatggatacagtagcctggcgggctatagtccatggggtggcagagttggacatgattgagtgactaagcacagcataaatgaaggaaggatgaaaaaatgagaataactgtctaatctgggttttaactttcattactattattacaatttgtgaaaaacaaaacaaaacaaaaagaacacttcaaaatgttgcttggaggagaatcttacatttttttatgtgctcgccttattaggtgtaacagcactctaattgtaatgattaacaatcatttcaaaagtgtaagagtacactgatgaggatggacggacattttataaaatatgcactgttcagcataagagcaatgtattaacatcttaattctgatatgaattaaagaaactggacttgtttagtacaacctgttaaaaaacacaaacgtgcaaacaagctaagaaagggaaataaaatgtaccaatctaccatacagaaacatgattctttgctagtacctttgtccttcttgaaatccagtgcatcctgcttatctgtgacaatttccttcatgttaacaacacttcggtggatcagctgacgaaggattttgatctcacgaatggctgtgattgggaagccctctttttcattgtccagtctcaccttcttcagggccactagctctcctgttgcagcaaattcaaacagttttatcataattagcattttctggccaccatcatgaatcaaccaatatatgctcttgctctgataaatttaatgcctactttaatgctacatgcaagatattttatatatatatatttaataaaaaatccccaggttccctttcttatctttgatttttaaatgactttccacttaaagcagcagtaccactaaatttttaaccttctggcatctagaattttttggcattatttacctgtgtctttgtccttggctttatatacctggccataagttccctctccaataatcccaataatgtcaaacttgtccacacagcgttttccccagtcactttctgtttgtcttctttctccgtaacgcggacaacaaattctaaaaaaggcaaaacaaaaaaataaacacaaaagttgctctaaaaatttaagtttttttttttttcttgcatcacacagcttgtggaatcttgtttcccaaccagggatcaaacccatgaccttcagtggaagctcggaatactaactaaccatgccaaggaattccctaagtgtattcaaaaagaacaaaacagaattcttttatgatgatttctctgattcctgggtcttttatcagtttctttattaaaaaggcaggaatcaaataatataaaataaacagtaaacagtctctcacagtagctgagatttttccttttttttgcctcaggaagacataagatcaaataatagaattgctgcttactttctaacttcttactagcttcctcaactatagaatgggaaaataatccatacatcatagggttactataaaagtaaaatataaaactttggcaataatatatgctcaataaatggcaactgtttttcttactaagagaaggcagctaacaatcagaagatcaaactcagattctactacattatgacatggcaactcatgtagttcagcagaaaaaaaccccgcatctattaattcctcattaatatatacatggttgatatcctctgaataaaacgatttttgtcttctttaatactcttaagtagtatgaactcaaaagatactgtgggatcaatgttcatggtaaacttgaacttgggaaattattacttttctaaaaaacatgacaaggtatctgggaatgtagatgaaagaattttatctgtgaaaataaaggaagagctacattaggcccaatcctctatgatcctaatggtgtaggttgtggtccaaaggtatccagaccaaaactcactttggtctctttttgtatggttgctgaggtggtgtgattgcctttggttctggagagtctgggggtgatggatccccaccagggagctctggagggagagggaggtctgtgagtaggtgacgtggtctttgttccttctctttcttcacaggttttgaaggtagagtttctttcggactaaacaacagagaggaaaaaaagaaaaagaccacaattacttaaagaatgtgcaaataaaactcaaagattgtaatgtctggttattaaaagattacaaaggttttactaaagggaaagcccctataatataacataaagaaatggagtttagtcacagttaaagagacttggattttgcaaaaagaaatctatagtatattaaaaaaaaacaaaactgggatattatttgtagaaactttaataaactttttaatgtcctcctgaagaggctatctggatttttactgagatgaaataaaatacaggaagttataaccttaaatttgcaaaacaccatggcaacctgcgtagtcaccaaacctgctctaaagatttcaataatgatggaaagcccaacagtgtaatactactatgttactaaagatgtggagagaaacttggaaaaagcaaagagtagtttagagtgttttgtaagaaatacagctaagctggaaatcaaaataaatgaaaaattcactgatttattctactggttgggaataaaaagcaatcatattcaaccacccaaaatggataaataatcctcaaactaagaatctaaggagaacaagtccaagagactatttcagaatcattaaagcactggtggctcaaatggtaatggttaaagaaccttcctgccaatgctgaagacacgggttcaatccctgggtggggaagatcccctggagaaggaaatggcaacccatgccagtattcttgcctgggaaatttcctggaaaaaggagcctaatgggctacagttcatgggggtcacaagaatcagacacgacaatgactaaacaacaacaacaacaacaacaaagtactggcagcagaaagcctctccaacaaattataatagtcagtgggggaacaaaagggatggcttttctggaatagattagaaaattcaattttcagatctaattttttaaccacctctacttatgagtaaaagaaggattttgtgccatgcatgtcctcagaaaaaataggcagcatactaattcatgtctagaaataaaaccatgatagtcttttgtattccatcacagtatcagaagattaaaaaggatctgagaatcctaatcacagtaggaacatctattttttcagcaagtggttattaagagaaaattttcataaatacttacatagaaccataaatacatctaagggataatacagctatgccttgcaacgtatctttttaaagcatactgctaccttcagtgtgtgaaatacaatctcaaaagctactacttcctattatttttcagcattttaatctcaaaattcatacaaaataacagaatctagtttgtaccatattaaccagaactggggtagtcaaggtagagcaaaacgatcatctgaaattttctgttaaattactgatagtgatgaacacacaccaacttgcagtaagatttttctaccctgaaacaaagtcttaaacaaaagagttaccagaaaactcttgggtcagaatgtctatagattttttaaatttccccaacttttaagacatttagaaaagaaaattcctagtttttcaattactgtgccaaaatactttttataaacttcaattcatgattcaaaaataaagtctagcttggttctgtgtcactagaattaaattaactgaattctttcaccatcatttcatgtaagttcattccatattttacatttacatcttattttctccaaaatttactttgagctcaaatattatttgctattgtgaaaatgtacattgcttctgaaaaattgtatttcagtctgttatttcaagaaagaatgaatgtttgatgggatatgtactaccagtttagagcacacaagttaaacagaggttaaattttgtttcaacaaattccacatgtaccaaaaaccttgcaataatgatgcataaaataaaaacgataaaattgcaatgcttagcagtattatggtctttagcctttagtgtagggtagtcactaaaataaagctctatatagttctgataacatatggtagatgcagaaagggtctaacatagtggaagaaatattgtcggagaaggcgatggcaacccactccagtgttcttgcctagagaatcccagggacgggggagcctggtgggctgccgtctctggggtcacacagagtcggacacgactgaagcgacttagcagcagcagcagcaagtcattgcttgaagattcagtaccagaaagaacagattcaccctatcaatatcagtatttcctgcttctccatttataccagcagatgggttcactcatggagacaaggttgcattaatgcctgtgtatgctgctgctactgctaagtcacttcagtcgtgtccgacactgtgcgacctcatagacagcagcccaccaggctcccccatccctgggattctccaggcaagaacaccggagtgggttgccatttccttctccaatgcatgaaagtgaaaagtgaaagtgaagtcgctcagttgtgtccgactcttggcgatcccatggactgcagcctaccaggctcctccatccatgggattttccaggcaagagtactggagtggggtgccattgccttctccaatgcctgtgtataattttttaaaaaaagttgtcaaatcccagcgtgctcaaattttagaatatggatcgtctcttggaatttatgatgctgaatttattctgtaggtacaatgtaaacgcctctgaaaactctttactgttaataaaaaaaaatgaatttacatatgaactctaccaaaataaaattaactttattttgggccatatcacacagcttgtaggttctcaattccctgaccagggatggaacttgggcccacagcagtggaagtttggagtcctaaccattgaaaagtcagggaattccccaaaattaatttttataattttcaaaatttaagataaactactttaaatatccccatccctgatggctcagtgactaaagaatctgccggcaatgcagcagacagaggagtcatgggttcgatccctgggttgggaagatcccctggaggaagaaatggcaacacactctattcttgcttgggaaatcccatggatagaggagactgggtgattaaacatgcactttaaatatggccatttatctcattcctcttaaagaaggttgtttaaaaagtgatttatttttataaacttctattaaaatttgaatgaacacattaaaaacattccattagcagtctaatagaacagaaatagaaaacaagcattctattagcaaaatcctaaattcaaacctgaacgtttaataggtcttttatacaagagttcagtactttaaaaatacagcctttaagaatcctgtagactcagacatagctgttcatggggatatgcttcttttaaggagatcatccataggcatgtggctaaactgcttcagttgtgtccaactctgtgcgaccttatggactgtaactcccccctcctccaggctctgtccgtggctctgtctatgggattctccaggcaagaatactggagtgggtattattctttatttattctttattcaagtctgataaaactccagatgaaccaggctatccaaaaaatagagaagaaaacaacattttgaaaaccctctatggttaactgaaaatttaaagaagagtatacagatgattggacttcccaggtggctcagtggtaaagaacctgcctgccaatgcaggagacataagagatgcaggtttgatcactgggtcaggaagatcccctggaggagggcatggcaacccactccagtattcttgcctggagaatcccatggacagagcctggaggaggggggagttacagtccacagggtcgcacagagttggacacagctgaagcaatttagccgcatgcatatggatgatctccttaaaagaagcatatccccatgaacagctatgtctgtgaagaatgcattatatcaaagtggatgtttggaagcctttgcttctagaaatcaagaattgtagactgtgaatcagaaaggtttttgcaaatatcattaattaaaattcactcttctattatacttctgctcaatgtacatactatacacacacacacatacacacgcacacgcacacatttgaaagagagattaattcttttcccagaaggacaaatcctctaatacaagctttatatcatccaggtgacaaataatttcttaactacatgccaaatttcatttcatacaagccctgaccctggttccttcagcagttttacttattcaaataatcaatatttaatgactacattctatgttttatgtttaaagtactataggcaataaaaggagaaggcaatggcaccctactctagtactcttgcctggaaaaatcccatggacagaggagcctggtaggctgcagtccatgggaccgctaagagtcggacacgactgagcgacttctctttcactgttcactttcatgcactggagaagggggagcctggtaggctgccgtctatggggtcgcacagagtcggacatgactgaaggaacctagcagcagcagcagcaggcaataaaaagatgtataagtcacattctcaacatttaagctcctgcagtctcctatgagataaagtacagaggaacagaagttccattcataactttcagatttcttcctaaaaagtcttcttacataaaattattttttcgggacttccctggcggttcaatggttaagattcagcacttcctatgcagggggcacaagtttgatccctggttgagtaactagggtcccaaatgccacacggccaaaaaaaacttgttttaaattaataaacaaatgtttttcatgtgaaaggtgcagctgtacatggaaagggtgcaccaaataagtaaatgaagacaaaaacagaaaagccatgaattttaagttagtacatagtgaaaaaataaaattgatattggaaaaaatcttcacttccatttttctacctttaataaggactattaaatgaaacagttatacttttggaatcagaatatgtaacaaaaataatttttctcacttctctctcgtgagtgttcttaaagacagctacacatactcaaataatcactgaatgatcttactttacccttcatttacaatctgaaagacagaaatctctatgtgccttctatcaaaattgttccacctctgtaaatctgcactctaccgtgactcatggtagataggttcaatgtctacttggttagttagccaagtaaacatttcaaaaggaagattcctagccacactgatatgatactagccactatgtaaactaatatttccaaggttaccgtggaaagatagtggcctaggttccctctggatgacttctttttcaacaaaactacaaaaatatatattttgtatctatgataagtatattgtgtacctcaaacaaatttttctacataaatttcaggttcttttcttctcctttgtagttctcaggatgtggcagaattcattaatacctattaatattagaaagagcatgtggaatttttctttaaaatcttatttaccactatatatagtaatggagccattcatttaaatagtctcttttcccatcatttattgcacttgcaccttctaaaaaagcagagagagtagtctgaaaaaatatagacctaaagggctgaaatgtatcactatttaaactactgctatcacctggagagtaatggaagcttgggaattagaaggcaatggcaccccactccagtactcttgcctggaaaatcccaccggtggaggagcctggtaggctgcagtccatggggtcgctaagagtcgaacacgacttcactttcacttttcactttcatgcattggagaaggaaatggcaacccactccagtgttcttgccttgagaatcccagggatgggggagcctggtgggctgccgtctatggggtcgcacagagtcggacatgactgaagcgacttagcagcagcagcagcagcacgactgataatatttatttctgtgcttacgatgaaaacttgttgcattaagtgaaactcatattctctataacaagagggcagaatctccatagaaaaacaataacccgaagactgccatggtatatgtcactgctaaatcaagtttgtttggttgtacttgcctagctaggtccgccaagaaattaaacaaatatatttccctaatgccttccatgaaatcagattcatgcttcaaatcatttcaggtctcaacagtcagaggattcattaaaatgagagctcttcttgtcaccacactgtgaatttatattctaattagcaaagactctacatattgttcttttgcttcttaaggataatttttttaaagcatcaagatggaaaaaagtcgatataaaagacatttttgggaccacttaggatattaatattattgatatgctactgatattattcaataaatgaatttttagggtgataaaggtattgtgattatacaggaaagtgttcttgttaggagagacatgctaaactattcaaaaatgtcataatatctatagtttaaaaaaatatggcaaaaaattaacaactggtcaatctagctgaagggcatacagttgtttatttttctgcagctatgtaatactgaaattttcaacataaaaatttaagaagaaaaacatgatttttaaaactttaaatcaaaattattgataaatactcttgtgagaaaaaggattactagacctcaaactgtaattctcttttcctaatcatgtcatacataaggactttttccactgaaaaccaaacatcacaggcatttcctattcatgaaagcattataaacagacatgcatcagaagaattttgacaaagtcttgagaacaaaaactacattacacttagatcagggttaaaatttcccaattaactacaggacttacctatccatgtcatcatctcccagtaataagggtgggaggggcagaggaggcaacgttgaagtttttaggtgtggaatagcagctgttacagatacttgagtcttcacagaaacctgtacagggggctgagaatttgcctgagaggacagagtagatgtccttggatgaacagaggggggcaaagttgaagtacttgaagaaagaacctgactaaatgttggctggggaggaggcagaggtggctgctgtggaatagctggcagtggaggcaaaggtggcaaggggggtgtctgtggtggaggggtagtagttggtaaaggaggtggagaagtaactgtgggaagaggtggaaaggtctccttttcagatgtctctgtctcttttggagtaacaatctcctctttcagtgctacaggtttagagtctcttgttccctgtactttcgtatctttaagaacaggctgcttctcagagttctcatccaacttcactttccctgtatctaaagaatttttgacctctgtgttaagatgtgttacattcaccagttcagtatctggggcagatttttccaattttacacctctgggtaactttttaggctccaagcctgaatccttagcctccactgaactgttctcttttctaggcaaaaatataggtgaacccttggattccttcccatccattttagctgctgcagcagctgctgctctttccttctttttcctactgagttcagctcccaagctggagttcaatggaagcctgacaggtgagatactggaatgtcgactgcgtgacccggatctcttctttttactatgagaagatgagtgtcttgaatatgcaggacttctacttctagacttcattgattttctactggaaaaagaaaaaaaaaattaaatggatagactacagcaatatggaagaaaaaagattagttaaactatgaagaactataactaaaaaaacccagtttgagtacttagcaatcttaaaaatatattgttgttgttgttcagttgctcagtcctgtctgactctttgtgaccccatggactgcagcacaccaggcttccttgtccttcactatctcccggagtttgctcaaattcatgttcattgagtcggtgacgctatctaaccatctcatcctctgccaccctcttctcctcctgccctcaattctccccagcatcagagccttttccaaggagctggctcttcgcattaggtggccaaagtattagagtttcagctttagcatcagtccttcctatgaatattcagggttgatttcttttaggattgactggtttaatcgccttgcagtccatggcacccactctcaagagtcttctccagcaccacaattcgaaagcatcaattctttggcactcagccttctttatggtccaactctcacatccatacatgactaatgggaaaaccataccttcgactatacagacctttgtcggcaaagtgatgtctttgtttttaatatgttgtctaagtttgtcatagctttccttccaaggagcatgtgtcttttaatttcacggctgcagtcaccatttccaaagtgattttggagcccaagaaaataaaatctgtcactgcttccatttttttccccttttatttgccatgaagtgatgggactggatggtaccatcaaataataataataatgatgtatcaatattggttcattaattataacaaatataatatattaatattaggggaaattgagtttgaagatatgaaagaattctttgtactagcttcagaatttttctataaattaaaaaatgttctttactctaaaaaatggattggaaggaaataatccttcatggtaacatatttcagtcatataatctaaaaattatccactacttattcaactgaaaaaagatggatggatattttttcccatgttagaaaatatccatattcatgattacttttagaattttggtttaaatatctgataaagtgaaaacatgatttttaaaagtcatacttaatgctaaacgtagtaactagcacactttaccaaaacctaaaattttaaactagagagctatctaattgagaaatcccaggaaaagattttgttcctgaatcctcagtttataattaagttgtgcctatactaaacaaactcccaagatgcaagccttaggatttacaaactacataaactggagaaactgtcttgacaaaataatttatgatgttcttaaaactatgatgacttctagtactttcaaatataaaatgatttccaataaacattttagaagttcataaagcaaggtattattgcatgctcaacttattttctccattattaagaaaggattggaaagtaaaatctgggaatctaaaaggcagattattctaaattaaaatccaagcccctcttaattctttttgctttttaataaagtcaaatgtactacggccttctcaggtagtgctagtggtaaagaacttgcctgccaatgcaggagacataagagacacaggttcgacccttgggtcaggaagatcccctggaggagggcgtggcaacccactccagtattcttgccaggagaatccccatggacagaggagcctggcaggctaaaatccatggggtcacaaagagtcagacacaactgaaggaacttagcaggcacacaatgtatcaagtatgactggacaaaacataatttgcccaatagtctaaaacaaattgttcccatttcagatcttcaatatctcccttttatggttgatcattggtaagactgatgtgattcaaaatgtttcaaaacaaacagcatatacatggtaggggaaacaattcacatgatgttagtcatgatcttcttatacccataatgccttttggaaattttcttccaaaagttaattaacatataaaataatcactggaatcaaacaacaacatttgtatgaacatgaggatacaagacaatgaaactagttaaatggatttactaaatactcagttactcttaagaaaactaatacatctgtaaataaagtggctaaaacaagaggctttctctaaattacaaactgggttgaaactaacattatcttaggaaaacactaagtaatgtcagaaacatgctctacaacccactgtttctttaatctttcagcatgactaaatcttcctaaagaactctgctacaaatcctttaacttctgaacagaatcttactgtaataggacatttggatggctctaagttacataaatgttaaagttgaggtccagatccactctttaagggaaaaagggggtaaaaaggggacaacaaataggtaaatcgtcttcaaagagtgaacaaaacggtcttcaataacaaatgtattttttccctgaaaaaagttaggttccacccgtttgaaatgaaattgctactattaatcactactaatttggtggatgtaaagatcttcagtttctctcaaagcattttcagtctttaaaaatgatatcgcttgtttaattctgactgtctctctcaaggcaaaaaaaataaataaataataacccagaagaccataaaagggatctgtatgttccctaccctaagaaattgaatgaggaaacatatgtacatatgcacatatcgcacacctacaaacatgtaatgctctttactagccaactaaaaatgtgcatgtgactccaggattattatttagtgtttatatttgtgtcctataggatcatgttgtgttttcaattctttcttgatttatttttatcattactgcactaatttcaactaagtgagtataagctttgtgcagtggcagtatcgtagccaatgaggtttatctgaggcgcgattattgctaattgaaaacttttctcaactaagtgagtataggaagagagaacttgagatttgaacccaaaaggaattattgcaaaagcagcttgtttttactgaaacttgttttagcctcaatgcaattctaaaatattctttcttaggcatccttaaaaaaacctaagcaattttagaaatagtacacttaagacatctacttcactgtatataaattgacttctcattcctccagaaaaaaaaagtgaactctagctaacggtgtacatgctaaagtgtttatagtgaagtatactgatgtacgcaacttactttgagatgaatcaaaacaaatgaagatggcttgatgaagcgatggatagaaatgataaaatgtatatcaagtattaattgtagaatctaggtggtacgtatttgagtcctgactacaataataaaatggaggggaaagcctaaggaacttcatactctgacagctaggaactcctttaacttgatgaattcaaactagtttatgaataattgtaactttaagtcagcaaaaattactcacatttacatataaaagacatggcatggatttttttctaatttctctactagttttcaacatttttctcactcactgataaaatttactgagcaggcactgtacctggctatgcactcatatttgctaattaaacctcgcaactctagaactaggtagttattactctcatttcacacacagagaaattaaattatatgccaaaggatacaaaacaagattaggattccactcagacgtgactcctgaactcaagttctaattttgtggaaaatggtaagactacaaagagggaggtacatacacctcatcacttaggaacaagaacagttttctgtagacaattcactccaacaattaaattttaaactaacatggctttatcaccaaaaatatcacagtgaagatactattagcattttttaaaagaaagattctgaaaactgctgtggtcacaagatagtcaatggtgatgcttgtaaagaaaatcaaagtatccttggaaccaatttctgccaggttataccataaaagggaagagctcagcttaattcccactagaaacatcaaagatgggagtctcttgtaagttgccaaaaaactatctataaagaaataaacttacaggtttggagacacagtggacaaggcaaatggtagatgacctaggaaaacagcctcaaataacacaaatgaaatctccaatcaggtccaataaagcttaaagcactaattccaaagtgaattttgaaaagttaagacaaagcaaccgaaataattggataaactctgggagccagtatcaactccatgcattcggtaagcagaagcctatgatttttctcacataggagcttacagccgaaggtcccagcattggaagtacctacctttatttagcagctttagacatgtgaactctcctcttcaattctgggttaaggggagaccagtctcacctacattatgactagccaacagcaaagtgttctagacaatgccaaacactgggggcttccacaaaatgttaacaggtctaatccccagttcctcataagccacagtaggaaagaacggactgttagacaaatagctcacctgggaagtggactccggctcagagagcgcttgctcagaaaagggctgctggaccgccttcgaccgtagggactgggtgatctcccactgtaagagccactcctttcatagctggaagaacgtcgccggccatagggactcacagacctctgtcgtctactgtagggactgggtgaccgagtgctggactggtaggcggaaggctccttgtaaggcgggctgattgactgccttctagaggtacttcccggactcttcttgtaggagtcgtaattgctagaggtgtgagatctcgggggactaaggtcataatcttggccgtaagacgctccggaggggctatcatcttgcttgggactgtcggaccacttccggtggggactcctggatctccgtttagggctgtccacggttttgtaacttttgggtgtttcccttttccgatgacttttacttcggtctttgtgtcccgacttcaactcacgttctttccgggtcttctccttatggagtttggatgacctggattccttgttgctgcttttcgagatctgagccttcccatggtcatcattctcctcatttgaacgctttgaacttcctgatatccggtccttcgtcgagcccgacttgctggaggcttccaggtttttttctttctctgtctgtttagtttttaataagtcgcgagtacgtcggtgctggtggtgacggtgtttatggaggcggtcactgcgatcagtcccgcgacgttcatcattttccctccggtccagtttgaaaggcaggtcgtcagaaaaggtatcggaatcagagctaatgtcatcatattccaccaaaggtttgataactgtgcccaaaggtgctgcttcgggtgtcaccaatcccatgtctttggagtgcttggacttatgccgcttgtgcttcgaccccaagcggtgacgctctctgctgttggagctgccacctcccgatgacggctgcaaagttccagaagctcccccactcccgtccttcttgcccccatgtctctctggattgggcattcccttccccctggcctcaaaaaggggaaaaagttccccagcactccaaaaagtaacccccaccctcccccccagccccacgcctaccaaagcgcccctacaagggggtggggagggaagggacggtagtccaggctcctcctccctcccgtctcctcagcaccctcctacatgaggtgggggtgaaggagccagggaagaaatgagacttcctcagcagtggagttgcgagacaacgagtagctgctcgaatctgtttctcctcctccccacgccgagccaatcctcaggcccagacgccggggaggtcgaagaagtaggaagccgacggctcggtgctgtgtggccgactctggctctggggccctgtgaggactacgcgggcccttcccctacccggtagcccggctcggggcggcttcctgtcgctggggtcccgcggcttaggtgcctcacgccccctttgtccctcgctcctgagagagtctcttttctagctt

SEQ ID NO: 227 - DNA, 39219 bp, Hippotragus leucophaeus
  source 1..39219: mol_type = genomic DNA
tgataattgtgtaaagaaatggacggagacggtgaaatgatcttgacagaaagaagcttcaaagtgtgtaggtgtaagagccccaaaaaggggttggcttatttctttttttctcttttggtttcaaagcagaaatgtggatgttctttctgctgtgtctctgtcctcagcttacctcacatttccctcttctcttactattttgatgctatttgatattacaggtagatattttccctgaggtcacctcctttgcttacttgtcatttgtctttctacaacaggagttccatcatcttcctctgaagacctagccatcttgctccatgaaggtcaggacagtctgacatgcacttgttttcttgcctctttacctgaagagtagtcctcttccattgtgtacatttttttcttaataggggaggggaggggagagccagtaccccccctccccttccctccttaaaccttggggaagtaacccccattgctttcccaagatggcagaccccatcatggatctgtttgatgacccaaatttatttggcctggactctctgactgatgacagcttcaatcaggtcacacaagaccctattgaagaagcccttggactgccaagctctctggactccttggatcagatgaaccaggatggtggaggtggtgatgtggcgaattcatcagcaaatgacttggtccccccaccagaggaaacagcccccacagaacttcccaaagaatcaacagctccagctccagaatctttaaccttgcatgattataccactcagcccgtcagccaagagcagccagcccaacctgtcttacagacagcaacgccaacatcaggacttttgcaggtctccaagagccaggagatcctgagccaagggaatcctttcatgggtgtctctgccacagctgtctcctccagtagtgctggaggacaaccacctcagtccgcccctaagattgttatccttaaagccccaccaagctcctcagtcactggtgcccatgtggcacaaattcaggcccaaggtatcaccagcacagctcagcccctcgtggctggcacagccaatggtggaaaagtcacttttaccaaagtgctaaccggcactccccttcgacctggtgtttccattgtctctggtaatacagtgttggccgccaaggtccctgggaaccaggctactgttcagcgcattgtccagcccagccgaccagtaaagcagctggtcctacagccagttaagggttcagctcctgctggaaaccctggggccacagggcccccactgaagcctgcagttacactgacctctacacccacccaggtgacttgagtgaaagggggaggtgaattttggtttaatagcgggcccagcaactgtgtgagagcaagcacatgagagctgtctctaggaaatctgcttaaattccgtctttactttttatcagttagtgttgatagccacgttatttgttacttacaaggtgaaagcagttagtgttaatgcattttttgagctcttactacatatttacactgtgcctagctggtgctgaacaagatagacacagtccctgtccttacagagctcaccatctgccaggaaatacagactttaaggaagaactcacagtggtggatgatacaaagttatacgagtactataggatacaatgggaacaaagaatcatttttgaaaaatatgtgtatttatatttgcaagacttacagaaactatgtgtatctttcctgttcttactaagattgtcctcctccagctttgcccagtgaaaagacttgtttcttttataagaaaataaagactctagcctctgaatcaagggccagaagaatttggaggaggggaagacagtgttcagataagtagggctggtgaagagaagctctgaggaggtggattttagttcattgtaaagacttttattctaataggtttccaaaaaatggaatgactgccttagaaaatagcaaacctttcagcagtttttcaagaatagacttggtacccactgggcagaggttatagaaaagatttatcaggacggataggaagatgaataaaggggattgtactgtcttttctgaccctcagtttttataattccaggatgaggaaaactggtgtaaatactaagaggtctacccttctttaatgtcctacctctcttggaatttcctgtcttcactctagggtgaatcgaaacgcatcacactggtcctccagcagccacagtctggaggtccccaaggacaccggcatgtcgtgctagggagtctaccaggcaagatagtgttacagggcaaccagctagcagccctgactcaagccaagaatgcccaggggcagcctgccaaagtagtaaccatacagctgcaggtgcagcaaccacagcagaaaatccagattgtaccacagcctccatcatcgcagccacaaccccagcagccaccctccacccagccagtgactctctcttctgtgcagcaggctcagataatgggaccaggacaggccccaggacagagactttcagtacccctcaaggtggtacttcagccacaggtgagactcaacatgttgagctaagaaggcaaacacgctcttagtcccctgatgttatcctcagcaaccactcactgttgaatgtggggccggtctagattcatatctctgaagtgagatacaggcttttctttctttcacccatgggaaccttattttaattatatcatgaaaagatttgagggttattgttgggtttgggataagagatgatttgtctagtatttgtctttaaattgttttatttacaatctttcctgatatccttgtgaaatgaaaatgactgaaaataacccctcatctgaaagataaatagtcttgaagaggtcaagtgcttatctatcattcctccccctatccccaccccaccccccaccacccccaggaagataaaggtaggacaagaatggaatttgaattttcttactagcctagacactagtgttgtctgtattgtttggaaattttattgtggagatgagtattgacagtagaagcatggctaaagaatatagaaggttaatttggcacaattgccttttctcatccccatcccaccaaaaaattactttaaaaaaaagcgtgcctctagattcagtaatgagtcttattcttaaggaattaagagaactaacgtttccagcctgtgtgctttagggctgttttattcaggtggtttagctataagcatgttgaaattgtagtgtctttatttctataggccggctcttcccaaggggcctcctctgggctctccgtagttaaagttctcagtgccagtgaagtggcagctctgtcctcaccagcaagtgctgctccccatactgggggcaagacaggaatcgaggaaaaccgtaggctggaacaccaaaagaagcaagagaaagcaaaccggattgtagcagaggccattgcgagggcccgtgctcggggcgaacagaacatacctcgagtcctgaatgaggatgagctgcccagtgtccggcctgaggaggaaggggagaagaaacgcaggaagaagagcagtggggagaggctcaaggaagaaaagccgaagaagagcaaaacatctggtacctccaaaaccaagggcaagagtaagctaaagtgagtgccaccgtttgctgttgtgatggggtctttggggagagtgcatacatatttaaattcctatttttaaattcatgctgtatatagcagctacagagttcaaggggatgtgtcatagaaaataataagtcctttctcttctctgttccaagtgaacatcaaggcctgggaaagacagccagtcttgagttagttttgtgtaaaagctgtattcttgattttgtatcactgtagtgtgaaagacttctccctagccccctacaacccacgccggtaaaagagctgctgcagacatagctgccctgttcttgcatttcatatgtgaactggagaagatttcagcagccactgtcagccttaagcagtcttgacagagccacagcttgtcacataactcttgccacaattgagtgtgctctcttccttccatgtcttgtaacttcactcctttctcgctagcttctactccctgagatgcttcaggctttgtggtttaattataataatgctttatatttgtacagggttttttagcttaaaaaagcaagtttcatgtctgttattttacttgatcttcaacagctatcacgctaggttttatcatcagtgtttgctagttagaagacttaacgccgagctagtgagagaactggaactgaaatgaggccttgtaactcttagtcaggaattggttctgctgtgttatgctgccttcattcaggtatttgtgaatacagtggtagcaaaaatttgtcaaatctggtgtaaaagccagctggtagtttagagatccccaaatcttttttttcaaacaccctactcaatagttatgtgtccccagactgaatatctagagcattggagaaggaaatggcagcccactccaagcctggtgagctgccgtctaaggggtcgcacagagttggacacgactaaagtgacttagcagcagcagcagcatgcctggaggtttcatatgtgataggttagattaattgtattttctattcctaaattttccttgccttcactgtaactgaatttggtttttcctttttagcaccatcactcctgtggtgggtaagaagagaaaacgtaatacctcatctgataattcagatgtagaagtcatgcccgcacaatcaccccgggaagatgaagaaagcagcattcaggtaaaagaatccctaaaaaacttcatgaaaagatcctgtttacttctttacaggcagaccaggaatagatagtgagagaccataagactatgcatattccaacagcttttctaaaccagaggtaggcaaaaaaaagtaaaagaggcaaaacctggtcatggtcgtggcttaaattttatttatttatgtttttaaggcaaaatgtgtattactctaaaaatgcatattactctacagtagtcattttctcaaattccagtgtttcagagactaagcagatatgcaattatgctgcaattgttgttttgggtatgttagtactttggtctttcttagaacagtccggctatcccttgtgcattacttacacttcagggttttgactctgtgaactggggagcttaaggcgcagtgtttttgctaccttttaaagatgagaaacattgggaagagaataaaaaaagctggatcaaaagaactttagtcctctgtctctgtggccttatggtaccatctttgactttagtttccaaccatggaaagaagaagctattaatgattcaggatacccatagtacttctgagtagctctaatgggtctggctagtttacttagctatatctaaattccttatctgaaagtggaggtttggactaaacaaacctcaggtccctcactagctatcaatactttataaatgtctcccctcttctttaatatatatttactgcattgacaaactgagacttgagtttttctgggggatattaacgtgaggataggacagacatttttgaaatggagagtgaagcaaaagctagatttaacagacattaaagtatattatgcaattataattaccaagagtttaaagaagaaatagcagagtgaaaaataacagtctagaaacagatccagataattttgagacattagaatgtgaattaaaaggccatttaaaatcagtggagagaattgcatggtggtccagtggttagaaccccacactttgattgctgagggcccggggctcaatccctggtcagggaactaggatactgcaagccaccaaggatggtgcagccaaaaaaaaaagaaagaaaaacgataataaaatcaatggaaagaaagattatttaacacattatgttaggatgactactcatttaggaagaaataaaactggatttcttacattactctttaagaaaaacaaattctagtttaatcaaaggtcaaaatgtaaaaattgaaatcatggacctttataaaacgtgattgagttaaggagggtattaaaatttccaagtcataaagggagagattgatatatttactatataaaaactatgtatatgtagcaacaacgaaaaatgctctaaatagcatagtgtttaagaccaagaccatttcttgggttctcatgttaactctagtatttgctaatattgtcacttaaggcaagtttacttgaccttgtggtgtctcaatttcttcatctctaaagtacagatagtaatatctactaagtagagttgttaggattaaatgtaaatgtttacaaaccatatagaagagtgtttaggtaagagagcacagtaagagttagatatgtttgttaaataaacagttaaataaagtgttatataatcaaaacaccaagtgagtatggcagaaactatcacagcatttaaagtaactatcctccaattaaaaataaaattaaaacacaaactgtaggcaaatctttgtaatacaagaaatacaagaattaataaaatttaaaaagtggtatattaatttgctagggttaccataacaaaataccacggactagatagtttaaacaacagaaatttattttcttacaggtctgaaggctagaagtgcaagatcaggaggtctggttacctccgaggcctctctccgtggcttgcagaggccgcctcctcactgcccccgcatgatctttgctcagtgcgtgcgtccctgttgtctttgcgtgtggccagattccctcctcttttaagggccctgatccagtagtgcccaccccaacttaatcacctctttaaggccctgtctccagacagtcacattctgaggtactagggggttaggattttaatgtcagaatttgaggaaacacaattaattgacctaattgtgtttcctcaaataccagtcttggcagtggaggcctcataattccacttccactcaatgttagtattccatacctattcttctgtactgtgcttttttctctaacagtatatcttgaatatagttctttattagaaaagataaatctaacccattcttcctcacactctttttttattatgaaaaatttgaaatatacaccaaagtagagaaattatttaatgaagccccacgttccatcatcccagaaggttccctggtaccctcttttctgtcagttcaccatcctctccccaccatctccccataagcaacaattgtgctcatttctgttaaccatagattaaacttagcctgttcttaaacttcatgtaaatggaatcacatagtatatactcttgggtctcacttttttcagcatagtggtgttcagaattattcatgttgatgtatcagaagttcattccttttttttttcttgagaaacattttactttaggaatataccacagtgtttattcattctgttagacatttggtttcttcagtttggagctgttttgggtaaggatgcagtggacagtcttagtacacatgctttgtggacataggttttcatttctcatagctaaatagccaggagttgatagactatggggtagttaaacatttgaccttttaaccttataagaatctgctgccttctgaagtgattgtcattttacacatggaccagcagtgagagttccagctcctcatcttcactgttcattcttgtccgtctaccccattctttttatatagttctatagtgttcctttttttgactgtagcatgatttgttcaatccagcccctgttggtgggcatttaggttttctctgctcttttaccaccacagataatgctgacagagatttgctattctttgttgttgttgtttagttgctaagttgcgtttgactcttttgtggccccatggactgccaggctcctctgtccgtgggatttcccaggcaaaaatacgggagtgggttgccgtttccttctccagggaaccttcctaactaagggattgaacccacgtctcctgcattggcaggcaggttctttaaccagtaagccaccagagaagcccacagagatttgtattacatgtacagatttatctgtaggataatatctttgaaatggaattgttgggtcaatggatattgtcaaattttgttatatagaaattttcttcatgccagtgtgtactctcaccagcagtgtatgagttcctatttcaaatatttgatcaaactcagatttttgcctctcggttagatgcaaaaaaaaaaaaagttttcagttataacaattttattgtgaatgtgagcatcattttacattgaaagccattcatgtttttttcctacaaaaattgtctattcatgttatttgctcatatttctattgtattgattttttttcttagttataagatcaaattgataagtcactttatcagaaatacctttcctactccaggattatttaaagaaaaaaattcttccacatcttttagaaattttgcctttttttaaactttgaaattattcagtctttttataaatttgtttcttatatcctctagatataagaaacaaatttgttttgtttggctagtggtctgttttcaatctcatttatagaataatccactttttcctcactgattaaaaatactatttttatcatgttctaaatccacctaagtattttaatctatatttggacactatttcattgatctgtttatctcctcctggagagataccaagctgtgttaatccttatagctttatactggctttaacattggataaggccaagtacaccttttcatatttttatggttattcttagatgtttagttctctgttgaattttagaatcagcttatctaatttaaaacttctgttaaatttgttttttaaatttttgtgattgaggaggttataaatatttcattatttcttactaaatttaatacttaagatgatcttttttcataaaaagacttttcttttattgtgttttctggcttagtctatgtaagaatgccattgattttttaaaattaactttatgccaagcaaatttatcaaatcaattttagtacaattgattgtactaaattgtactactaactactaaaattgaatttagaaatcaaatctgcttctaatgactcatttggttttggatattccaggggttataatcattactgaaaaataattttttctctccatccttcctaatttttatcatgagctgtacctattactgagattatttaattaaattttgctcaaccacttgaaagaatgaggtagatctgaaattcattgatatggaaaacatctccaagaaaaatgttaacaaaaagtaagcagcagaacagtatgtgcagtatgatcctatttgttaaacaaacaaaactttagaactaaaacagacaaacagttagaaacaatgtttttgtaccagtggactccaaggttgctcctggtgtgaagttcattgcaccctgcaggtagagagtttaaagagttctattttagtttttcagagcctcttgccaatagtacccaggttactttcagatggattctgatactataatgaaagaattcaggaaattaatatttattcagtacatagaatacgttacatggtttaatatcatacaatttgataaataagctctttaccatcttttggtttgatttttcctagggaatttggagtcaaatctaagtacatgactatagtcaaatagttttaaaggttttctgtttgagagacctaagcagttattttgactgtttttgcccctgtagaagagacgctcgaatcgccaagttaagcggaaaaaatatacagaggatctggatataaagatcacagacgatgaagaagaagaagaagtggatgtaactggtccaatcaaaactgagcctatccttcctgagccagtgcaggaaccagatggcgagactttgccttccatgcagttctttgtggtaagctgagaactaagcaatttgagatgtgtgtcttgctgctcacaatctctttgtttgactgactgcatcttttcctgcaggagaatcccagtgaagaagatgctgccattgtggacaaagtgctttctatgcgtattgtgaagaaggaggtgaggcctattttccatgttagcccataattctatagttacagactttatgtaatgagcaccttcggatgtcagtctatatcgctacaatgtagttacaagagatagcggagaaaagttaggtggaaagtaaggactgtcttattgccccttctttcacttacctgcttaagtccagaaagggcttgttttctccagctatcaggcttctagtattgaaatgccagattaggttctttaatcctttagtcagtgatatatcctggatgatatatattttattcttggtatggaagtctaccacgtgtattaaaattaaggagtctctttgacagataagttgttaataactgtaatttttttcttcccagcttccttctggacagtatactgaagcagaagaattctttgtcaagtacaagaactagtacgtgatctgtacaaaaagcttttcaccccaaattccacggggttgtaataagttctcctgtatagtctgtcctggttgggaaagtgtcccttttttaaaaaaatagttttcctcacccaaattgtttccagtgaggaaaatgtctgttcagggagaggctcagaaattgactgattaatatttgcctacagaaaagtggggtaagggtggttcctgataaaattccttgtaatcctgacattaagaccttgctactcagtgtgatccattgaccagcagaattagcatcatttgggtgcctgctagaaatgtgagctttcgggaggtgggagaggggttcaggatggggaacacaggtacacacttggtggattcatgttgatgtatggtaaaaccaatacaatattgtaaagtaattagcctccaattaaaatagataaatttatattaaaaaaaaagaaatgtgaactttcaagccaaccctaaactaagtggttggtgtacaaaatcaagtttaagaggcactgatctaagagactatctccccactgaagcaacatactcttaggtctgcttttggctactatcctcatctcggacactagcttaccagttccactttctcataccatggctgacgatttccatctcctttagctcctatctgcactgtgaatgggctaccatctcccagctggagaaggataagaggatccatcaaaaactaaagcgcttcaaaacaaaaatggctcagatgagacacttcttccatgaggtaattagggataggtattgcttatcatttatttcataaaagcataaatttctgaggttatccctgactgattgttcaaaagacttatagtttagttgctttatatatatgggtatgtaagtttcatttcgatcattggactctccttatttaattgccctatgctttgttttactaggtctaaatatggtctttttataagttatagaatgttttgaaattgagttgtttgatatcatgaagtattttcaaaacggatgattaactctctggtccacttcaggcattcttctccctctattgtcagtctttagcaactgatggtatctgtagacataagcaaccatgtcattaagagggagcatttattttctcaagtttctaatccagtataactaaaaatagtgataaaggaactttaatatcttacatttggtgttactactagttaagtactggagcatctgtgagaatctcttgagctgtattttaacactttatttttctttgaaaactttttgtacatatatcttttccaaaatgggatttttaaaatctgtatttaatatataatactaagtgccttgagaaaaagaattctttttcaaagtttcttaagacctaaagaggaagaggtctaataagaagactgaaagaaggaataatgtatagcttcagcaaaaaaaggccagttgtggccatattcatctgatgaagctatctttatatcaccagatttatcaataagtgagttattttccacatcacttggagagagcaagtaggaccatgtaggttttataatttctttttatatgaaaataaaataatgattgggttgtggaggttttgttttgggttgttgttttggcctatgttcttttaaagcctaatttgtgaaatgtacagtgaaactgtaatcccatttcagctgatactatagatataatttgtggccattgagccaagctctgctaactgacttgtgtgccagtcagatttgcctttataggtaggtcatttagccaaatcaatcactcatttattcattattttatgtgctagtcactgcggttaacagatcactcatggtctgtgttcttatatagctcactgtctaatggggagggagagagagattttaaaataattcaaattgtgataagtaccagcaaagaaggagcataggaagacattaaaaaatgcttgctttggataatccaggaaggcgtcactgagaattgaattatgaatagaagttagcaaggccataaacacctgtaaatagtacccctggcacaggaagtagcagtatatgaagaccccaagacaggatgaggaactgaaagcacaatggtatttatgtatgatagaagcaggtgcccacagaccttttagttttgtttttattctaagtgcaaaaggggaaaccactggactatttaaaacaggccagagacataaaccagttttcacctttaaaagatcatctagactttggagaatggatgggagaagagtaagcatgaaagtaggatgagccgtaaggaggccattgaagttttctagatgagaaattaccaatgctttatagcagagtgctttcagttgttggagagaagggatagatttgagtttactttaaagtagaattgacggcaattggtgtaatggcttacatagacggtattaaagaatggaagatcttagaagcaactggtttggggaaaatcaagattttagtttagaccatgttaagtttaaaattccataacatggctagcaaggagatagatacacaaaactggattttttaggctacaattaaaatttggaatgtatcagcatatacatagttactaaagccttaatgactatgccagagtgataggagaaatattagggaaaagataggccacaaaaatcaatgggaaagtgccataagaaagaagaatttttttcccctaaagtttctttgagatttctctttggagccttgggttatttatcttggcatatcacccaaagttagataccagtgacttagggaaaaaagccagtgaacgtgactgagaattgaccaaaacaaaaagtgaatccaaaataaggctataaaagtgaatatggtgtctcagaaaagcctagagggtgctttcgggagaaagatgaattgttgaatactttatagctataaattaaggtaagtacagaaatgtttccattgtatttggcaatttggagatcatgaatgaccttgatgagtggtttcattatgtgatggaagtagaagagtggaatggatggacaaatagagaagtgatgaaatggaggtactgtgtatttaaaactcttgggaaagtttacatatgaagcagaacagaagaatagttgcggggggatgtagagtttttaagatgtgaactagtagaacatgtgtgtatattatgggaatgttgcactagagagggattcctaagaaggcaggaaggaatgaaatccaaagcatatatggagagagtagccactgttaggagtagtcacacttgatctggtaacatgagaagataggtgcaaacacaggtaagtgtgtaggatttgatagggtgaaaatggggaactcccttcttttttcttaataaattttgaagtaaggatatccactaaaggttgggtggaagggtgaatttcctagacagtgatctttttggttttattgtttggtttcataattcctctaggatgaagagcccttcaatccagactatgtagaggtggataggatattggatgagtctcacagtattgacaaggacaatggggaggtgagttgggatgtggaggaacatggaaggccttaaagatttctgcctgtctgcttgcccatcctttatttttcagatttggctgaaacattcttggattgaaaaggtacttttgaatttttttctgagagaacctcagaatgatattgggaaggtagaggagcacagagagaggctaaagagaaagattctcttgaagtcagatatctggaaggtgtatttgcaaggactcattcaccttgatctcattttctctcaggttttatataagagacccttgacattcagttgagggtgagaggtggggatagagaaaggaatactttatcaatttccaaatatatgaatataaaaatacttgcatagactcatagctttctctaagttgttgagaattatttatttcctgaactggggcttccccagtggctcagtggtaaagaatctgcctgtggtgcagaagccacaggagacacgggttctatccctgggtctggaagatcccctggaggaggaaatggcaatccactccagtattcttgcctgggaaatccagtggacagaggatcctggcgggctccagtcgataaggtcacaaagagtcagacacgactgaagcgactgcgcacacatgcacagcatcaggtaaatgcatttccatttgtcactaaaacacatactacatttgagtcaggacttctaaacagactgtgggctcttgctcccacaagtgcagatttagtacatctaagggaggaccgagagatctgtatttttaagttggttcttcgaggggttctcatgcatagcttggtttagggaccccagaactaaagcttccttagattgggtagcagattttacatatgttgaaacatttggtgacatgttttctttcattaattactttttttcattttccaaccaagagttatgtagatctaagccacgagtgaattcaacgttgctctcttttattcagatttacttggaccgtgaatcagcactttgttagaactcttttcacttctagtctgagttgttagtttaacatcacaggatcacatttcatcaaaattttatcactcaaacagttcctgcttacagagtgactagtagggaacagcagagccttgttaagacatcagtgctagatggcagactgcgttcactcacaaagtgacttgctcccatatgacatccttgtagaaccttatagaacctaagagtcaaagtcttccatctgttaaagcccaagtttgttttataatctttcaaggttactcagatagaaccttagctatccaaagtcattagaacacaatgtctttaaatcctaacaaaaatacctcagaaaccacatatttctgcttttgcgcttaggggtgggaattattgcttattgtttatttgtgggaggtgagagtgaaatggaccagttattagtcaggacaggttagccattgttatattattctcattactttcaggttctcagccttcctagccttaaaaatgttatgctctttatcactatacttgtactttcatcttccaaaagtaattagattttgattaggcccctctggaatgttattagacctggcatgacagatgaaagtgttttagtaccctaatttacacttctaatattggataaaaactttgcccatttccactgtcccaaaatgagcttaattagtcatccttattacattacacagtagtggaaataagtattacaataaatattaattgaagtccttggaaaattagttatgatgctggaaatgtgtgacctggacaaatgtctttatgtaggaagtgacccgagttactacaataaagaagaaaataaaagagaaattacatagattctagtttttccatgatctgtgtctcttaaacacatcgatcttaagacttcttgctggctattttaaggagtattttatcagtagattattagagatttcttgatgattatactcagttcagttcagtcgctcagtcatgtccaactctttgcaaccccatgaatcgcagcacgccaggcctccctatccatcaccaactcacggagttcacccaaactcatgggcatcgagtcagtgatgccatccagccatctcatcctctgtcgtccccttctcctcctgcccccaatccctcccagcatcagggtcttttccagtgagtcatctcttctcatgaggtggccagagtataggagtctcagcctcagcatcagtccttccagtgaacacccaggactggtctcctttagaatggactggttggatctccttgcagtccaagggactctcaagagtcttctccaacaccacagttcaaaagcatcaactctttggcactcaggtttcttcacagtccaactctcacatccatacatgaccactggaaaaaccatagccttgactagacggacctttgttggcaaagtaatatctctgctttttaataggctatctaggttggtcataactttccttccaaggagcaagcatcttttaatttcatggctgcagtcaccatccgcagtgattttggagcccccaaaaataaagtctgacactgtttctactgtttccccatctatttcccatgaagtgatgggaccagatgccataatctttgttttctgaatgttgagctttaagccaactttttcactctccactttcactttcatcaagaggctttttagtttttcttcactttctgccataagggtggtgtcatctgcatatctgaggttattgctatttctcccggcagtcttgattccagcttgtgcttcttccagcccagcatttctcatgatgtagtctgcatagaagttaaataagcagggcgacaatatacagccttgacgtactccttttcctttttggaaccagtctgttgttccatgtccggttctaactgttgcttcctgacctgcatataggtttctcaagaggcaggtcaggtggtctgctattcccatctctttcagaattttccacagtttattgtgatccacacagctaaaggctttggcatagtcagtaaagcagaaatagatgtttttctggaactagcttgccttttcgatgatccagcagatgttggcaatttgatctctggttcctctgccttttctaaaaccagcttgaacatctgaaagttcatggttcacatattgctgaagcctggcttggagaattttgagcattactttactagcgtgtgagatgagtgcaattgtttggtagtttgagcattctttggcattgcctttctttgggattggaatgaaaactgaccttttccagtctgttgttgctgctgctaaggcgcttcagtcgtgtccgactctgtgtgaccccgtagatggcagcccatgaggctcccctgtctctgggattctccaggcaagaacactggagtgggttgccatttccttctccagtgcatgaacgtgaaaagcgaaagtgaagtcgctcagtcgtgtccgactcttagcgaccccatggactgcggcccatcaggctcctccgtccatggggttttccaggcaggattgctggagtggggtgccattgcctcttctgcttccagtctaggcctagtctaattcttcatataagccccaaattaaaatgcagtcaagtcaggagtcatcttaagtactgagaataggagcaatattaccactggaatgcctgcatagagcatagcagtgtgattggagcttcagcatccccttttcactcttacctcttttcagtgataccccttgtagttatctcctagcttcctgggactcacaaggaaatctctttcccaccatatgactgctcttttttttcatgtgactgctctttgaagtagcacctgcattcagagctccaggaactcagaagcccagtaatttcagccctgctttgttctgtggatttaacctgtttctcacttgtaaaagcagccttgcttccactattattatattaggtgccaggaggatagtatggaatggggctgccatatcttctaatttcaatctaattcaacacaatatagaatttttttttttttttgatctgcttggttggtgagcctaatatttcagtgattagtgttctagataatgctgggtagaaatttctcttttagattctgataatttgtctggaagcatgatcaaaggcacaaatagtacagtgcatctgcaggtgagcctatggctggtgttttcagtctgatattttgggcacctttttaggtattgacacttagttaaattcttaatcttcaaatcacagcagagaacacggcatcatttcactaaagctctgacttcttctcctctagcctgtaatttactacctggtgaaatggtgctctctaccctacgaggatagtacgtgggagctcaaagaggatgttgatgagggcaagattcgagaatttaaacgcatccagtcaaggcacccggaactcaaaagggtggtaagtacatctgcatttagagtgtaaagtccatatagggaatgatttaatttccttcatatagagtttgggctttcctgatagctcagttggtaaagaatcagcctgcaattcaggagaccccagtttgattcctaggttgggaagatccactggagaagggatgggctacccactccagtattcttggacttccttggtggctcagtgggttttctgtcttttttttgttatgaaagtgtcattgtgaagtcatgaatttgaatatatttaacatgtttaatccaagcaataatgtctttgaattgacttcacctattagaactacgtagtaagtttacctggcaccccactccagtactcttgcctggaaagtcccatggatggaggagcctggtgggctacagtccatgggatcactaagagtcggacacggctgagcaacttcactttcacttttcactttcatgcattggagaaggaaatggcaacccactccagtgttcttgcctggagaatcccagggacgggggagcctggtgggctgccatctatggggttgcacagagtcggacacgactgaagcgacttagcagcagcagcagcagtaaatttacctaatttcattagtacctccgcaccatttattcaaattccttactttttagaatcgtccacaggcaagtgcctggaagaagttggagttgtcacatgagtataaaaacagaaaccagttacgggaatatcagttggaaggggtcaactggctgctctttaattggtataacaggtaaggaaaagagtaggaccacaagatacaggcttagtctggaattatttttatttattttctgtagaaacaggttcattttatgtacttttttataagatggtctcttttgacatgcttttcttttttttgtgatgaattggcaggcagaactgcattctggctgatgagatgggattgggcaaaaccattcagtccattgccttcttgcaggaagtatataatgtgggcatccatggccctttcctagtcattgccccactgtccacaattactaactgggagcgggaattcaacacatggacagagatgaacactattgtgtaccatggcagcctggccagccggcagatgatacagcaatatgaaatgtactgcaaagactcacgggtgagtttcctataatgcaaatgttacggcttagagagtaggtcaaagtacctggtattttagaagcttttatatgagtcaaagacttttattgagactctctgtgatgtaaggtggtgttgtctactttatgcaggatacttttccaactttgctattttgatccagtgaacattttgatccagtggaaattctgactttatttatgaatatatacattttaaatagttttaccaggattgattagttttcatcaagaaataattttccagaatgaaattcatttagctacttttaattccttgattcataaaatggtgaacataagacatttcttccttttttttttaagtctgctgaagttttcatcaagattagttcttttttctatataagtttggaaaaggtttcttaacattgaattttgagtttttttcctaccattagtttcccatttttatttctacgaaacccaagtttattcaagtcattttgtggctcttaattttgttaagataattggattcttttgtccatttttagatagtaaccaatattaccacatactacattagctgtttcacttttagttttattttgtgtgtttcagcagtgctcaacatttgtggattttagtgtttaccaacagaagatgtagggctgaaatacatgaggtaggcatgcagcaaagtcaagaatgtccagcttctttcagtaaggtctgtgatttttcccaagaagctgagtgtgttgaagaggcagtgattcagtgatttgacactgtttatcaggaatatgaacagtggcagaggtgggtggtggtgcaatttgtgttttctattaggcctgcctaaatataaaatgcagaatatatagtctagaagagcttctcatttaagtacattttaggccttttctgactttgttgccttcatgcttaggggcgcctcatcccaggtgcatacaagtttgatgccttgatcaccacttttgagatgattttgtcagactgtcctgagcttcgtgagattgaatggcggtgtgtcatcattgatgaggcccatcgactaaagaaccgtaattgcaaactgcttgatagtctcaagcacatggacctggtgagttcctcccactgacttgtggccagaaacacctagaattaagtaatcttaattccatgtgaattaattttacagagaagaatcagaatcttggtattgagtggtgggtgtggcctatggggatggtagcctgaaagtcataaaattcatataaattttagagttagaagatgattgtgggttagtggttctcaattgggtgaagaggtgagatgttaaattagttacctatttctccataacaaaatatccaaaaacctagtgacttaaaacaactatgtttttcatgactctctagctcagcaacttgggctgggctaagtgatctcattctttcagtggccttgccaggagtcagtgatacaactgcagctgacagttggtactggttgttggctaggccatcttccatgtggtctgtcacccctctgtgggccagactttgcttctgtacctggtagagtcagagcagtgttccaagagggtaaaggtggaaggcaaggcctttgaggctctgaaactcacatggtacccacttctgctacattctcattgtcagagcaagttataaagcacgaccatgttcaagtggtgaatcttgataggaggaactaccaaaaatcaatggccatatttagtcccgcacaggtacatttcttagaggcagatatattaatggatatccgtgggaacttgagtgtggagaggcatatttaattggaaaaaatatgttctaaatatttctttattgccgtatgatattaaagaaattaatatgttaaataataatcaagaatattcttgagtattttgtgtttatcaaaagaggcagcaagtaaaagtaatctggtccatttccataattttacagttaaagaaatggaaactaaagttacatacttgatggaaaacttcagaagtctttctgagttttatctttcttctgtgttctccatttctaggagcacaaagtgctgctcacaggaacaccattgcaaaatactgtggaggaactgtttagcttgcttcatttcttggaaccatcacagtttccatcagaatcagaatttctcaaagattttggggatctcaaaacagaagaacaggtaggaagttgtctgatgcgatattaatgcagaataaaaaaatttgtactagggaagatatctactgtcactgatatccatgtttccatctaatgtgacaacgtttgtcctcatgttgttattttttcctctgttggttacaggttcaaaagctacaggccattctcaaaccaatgatgctgagaagactcaaagaagatgttgaaaagaacctggcacccaaacaggagaccattattgaagtagagctaaccaatattcagaagaaatactaccgggctattttggagaaaaatttctcctttctttccaaaggggcaggtcatactaacatgccgaatctactcaacacaatgatggagttgcggaaatgctgcaaccacccatatctcatcaatggtgagagaactcctgaaacacctgcatttctgtgttaccttgattactaaatggtgttcctcagaaacaatagatgggttggctgatccatcctagtttggaaatagaggggatttctctttttaaaaccattctcaagtggaacgtcttcctctagttctttctgaccctttgatgctgcataatctccaaagttaaaaaggatttgctgttaggaattctgttctgtcttcactgatattctatgttgctgtttctgttttggatggcagtatggtggtaacagtggtccttttccacatatttacatattttactctgatttatgtggaataattcttaagcctgacttatatggaatattttgtattaacaaaattgaggatattttagggtttgggagttgctgaaattctgttttcaaataatattgatatcaagtcaggttattttcttttctttgcttccttatctcagttaaataaactgcagccttagtatgtgtctcgggatctcaccatcaggtctgatttttcttttggcaggtgcagaagaaaaaatcctaacagagtttcgagaagcttgccatatcatacctcatgacttccacttgcaggccatggttcgttcagctggcaaattggttcttattgacaagttacttccgaaacttaaagctggtggccataaggttctgatcttctcccagatggtacgctgcctagatatcctagaggattatctaatccagagaaggtgagaagaaagtcattcctcgcctgtttactttgtacttaaagagctgcaaagaatgggaggcctgggtttaaataaaattgaccaggactgggctaagagaagtattcaaaactctcactctcaactttctgataaaatttttggtgaactagcaatacaggggtactggtattgatcccagcctgcttttttcttctctttttctgctcagctgattaaacttttttcctgtgattcccgtgcaggtacttatatgagcgtattgatgggcgagttagaggcaaccttcggcaagctgctattgaccgttttagcaagcctgactcggaccgatttgtcttcctgctctgcacccgggctggtggacttggcattaatctcacagctgctgatacttgcatcatctttgattcggactggaatccgcaaaatgacctgcaggtagaggaaatcattgtcttagggactaatcacctaacctgagaggttttgcaacaggatcaggctctcttagaaagtcttatcttttcaagagtctggaattgtttagttagttaggtcatcaaactttttctgtacagggcagatagttaatattttaggctgtgcaaatcagtctctgttgtaacggttctcctttgctcttggactacaaaaaacatctgtaagcaaatataaatgaatgggtagagctgtgtttcagcaaaaactttagaaataggtgaccaagatttgctgacacctggtctagatgatgaggcagtaatttcatcttgaaattgactttctgatgttgagttgatctcatggctgctttataaatgtaaatcagtattttgaatgcttctcctccccaccccttctaatgttatctttgcccttccttccatttgttaaaactaggcccaagcacgttgtcatcgaattgggcagagcaaagctgtgaaggtgtaccgtctcatcactcgtaattcttacgagagggagatgtttgataaggctagcctcaagttgggattggataaagctgtgcttcagtccatgagtggtcgggatggcaacattactggagtgagtcttctttttagctgtatttattaataggtcatggtgatgaagggaggcaaaagctattttttgtataggaacctgaccccttgtttggattctcaatgattattctttaaaatataataaaatatcatgatatggttagataatattctctgatttttttttttaacctttctgttggattttgtagatccaacagttctctaagaaggagattgaagatctcttaaggaaaggagcgtatgcagccataatggaggaagatgatgagggctccaagttttgtgaagaggacattgaccagatcttgttaagacgaaccactaccatcaccattgaatctgaaggaaagggttctacctttgccaaggtatgttctgtcagtgctagaggcttttagcacagggagacaggaatctctagaatttaatattttttaaaaatatagtttttttttaatatagttttaaaatatactgatttccctttactcaaaaaagtggtgtagtcaactttagtatttcttcgttcctcattaggcaagctttgtggcttctgaaaataggactgatatttctctggatgacccaaacttttggcaaaagtgggccaaaaaggctgacctggacatggatctactcaatagcaaggtgagcttccttttccttcaaagaagaactatggcaggaaacacattactttctggagtctttacaactgctctgattcttcagtgctgaccttggcttatgatggtatatcacaggccattgtaaaagctttctacatagagggccactaaaaagtacttagataattatcacttaagtttgcttcctgaatccctgtagattatcttgcatgtccaaaaaagaatctatctttgagtatctacagatattacatgcaaggctatttcagtctgattatctttaattcctttcccatgattatattgtgaaaagagttacttctccttctgttctctgcatagaataacttggtgattgacacacctagagtacgaaaacagacccgccacttcagcactctgaaagatgatgacctagtggaattctctgatttggaaagtgaagacgatgagcgaccacgctctcgccgacatgaccgtcatcatacctatgggcgcactgactgttttcgagtggagaagcatctcctggtatatgggtaagaccccatcttgcctcagaggtagtgcattccttcctgatagacatctcgttcgctttttaaattggaaggtatgatcaaagaggggataatgggaaaaaatttattctgttaccatgttttcccaagatcattttgtctcccaccatctgggaagtatgaatttgagggactggggtccctaggaaaatatccatatgattgcatttttctgtagttggggacgatggcgagatattctgtctcatggacgcttcaagcgacggatgactgaaagagatgtggaaacaatttgccgggccatcctcgtgtactgtctcttacactatcgtggggatgaaaatatcaaaggcttcatttgggacttgattagccctgctgaaaatggcaagacaaaagaattgcagaatcattcaggtgattatcaagtctttgctttttgtctttctataggttacctaatccttttcaggtccaagggtttttctcaatccaagtcttcgatgtatccccttccccaggtctgtctatccctgtgcctcgtggacgcaaggggaaaaaagtaaagtcacaaagcacttttgatatccataaggcagattggatccggaaatataaccctgatactctgtttcaagatgagagttataagaagcacttgaaacatcagtgtaacaagtaaggatggaatttagcagactaaaggattttccacctcacgctttctgcactattactgagccagttcttcttctctcccttctagggtgctgttgcgggtacgaatgctatattatctgagacaggaggttattggagaccaggcagagaaggtgttagggggtgcaattgccaggtaaagttatgctttatttttctttatgctatgccttattccagaatagattggtttacttacttcactcttaactatctttcggatacctgataattaaaatctgtatatcaggtcttcagtgctatgcagttggccttttgtatccttgggttttgcatccttttgagccacagttgatcaaatccatggatatcgagggccagctgtatttactgtatgattccatcttatattaggggcctgaacatcagtggattttggtgtctggggtggaacgaatcccttacagatacaaggggacagctgttcttgataccagtggaaggaaataggcagatgtaggactatttaaattaatacagaaaggaagatacctgtaataatctttccaaagattgtttgcttttatttcctgcatcactgtgctgactctgcctcttacacctacagtgagattgacatatggttcccagtagtggatcagctggaggttccaacaacatggtgggacagtgaggctgataagtccctgctcattggagtctttaagcatggtaggtatctgctcttagtctgttcttttcctgttacagagttttgtccacagatgaaatattttgcaaagtacttaagaccaataattatgtttgaatggttaactggttctcagaaatatagagcagagctgttcctatgaatagatggtcaggaaagaccagatggatagttaaatcgcaaggtagggtgtctcccatctgttctgtgattaatcagttactaccagtctgtatgcagtggtgtctaagttaaggtttgcaatcaggggagatgatgcatgtctactgttgttaataataaacatgtttactttgcatagctttgctgtgccttgctgaaaatgttctgtttctatagcatcttgtttgtctaaatattcagcactcactcttacataggtatgaatagccatgcttgagtgaaagaaaaatgaaaaaaaatttttttaggccagtggaaaaaactggcttgaagtagagtagaaaaaaggagaagactccctttgcaatcttccctaatcacaaattccacatataaaaagtagtaagggctaacttccagcctattaacttagtgaattggaagattatttcttttttaatatacttttctgtttacttctataaaataaaagtaatggcacttaattcacatttttgacaagtttaattggatgagaaaaactgtgagcatttgtagtattagatttacttgtgaggtgcagaggctttagaagagtccaaatatcctgaagtacattcatcattcatccaccattcagagtacctgtttgcaggtacaaatttcttatcctttatttgaaagtgcattacctaggtctaaattattggactttaaaaagttcctcacctgtgtagtaagaatgatgataaaaaattacccgttaaatggctatgtaaatctgtcaccattctctatacacactgattaaattcctattttcggtaactagtgataaaactctttatgactctgaattggacccaacagctgtccaaagtaacattttcagagtactttacactatgagcaaagtagcccacatttttattccagcagcatatgaagtaagcgtaaaagcaaaatgagtctctgattttctttaaattatggctctttttcttcaaggctatgaaaaatataatactatgagggcagacccagccttatgcttcctggaaaaggctggccgaccagatgacaaagccatcgcagcagaacatcgcgtgttagataatttttctgacatagtggaagggtaagcattgatgtttagttctcttaaagctgtatctgcattacaaaggatatttgttgcttgtgctaagagatgacatgactctagccttgactgaatccattgggattcctaatggtggttatactcacaaatcataaattcttaacaaacagtgcgaccagcagaaaggtccaaaatggtgaaccatacattgtcatacaatgcaactaagggggacaattattcccaaatggcttatttgatcttctcttcagttttctgtgccgtgctttcagctacagtagcggagaggataactgcttctcttgaaagatggtagccctgcaacagtcccataccacctgtgtgatagatcctcaggaaactttagccttggtctgtcattttccagtgtcagctgacacataaaggtgtttactctgcctgagtccatgcctcagtgatgagttgccatgctaatactgagccaccagctagggcagtattgccctggtttgggtgccagtgagtttaacaaaacttctcatgtggagacctgaggggcatgtgaaatatttgacttagttcatgaataccctcccagtcccttattattgaaagatttttcttcagtgatcacagcctcagtttgcctactgtaggacccacaaaggaaattagatttacttattgcaaatcatgtaatatccttttgctcagtagagcaaagtagtaaaaataagcaggcatagatcattcattccagtgaaataataaaagtagatactagttgggacagagggggaaaatgggttaaataataaaaagctattaagaaaaaggaaatgtgctgtttcattttaaaatcaagcagtttagaactcaatttgtcattttctcatacctctggataattttagggttgactttgataaagattgtgaagatcctgaatacaaaccactccagggacccccaaaggaccaagatgatgaggtgaggaattttcatttgagtctagcttttctgtattactaaacagtattttccaattccctgaatcatgaagtatactgattaatttataataaaaaatgaaaagtaccattcaagaatataaagtattaatggaaaggattgtaacaccagctagggggggtcagggatgattttttggaggaggtgggacctactaagctggacaatgaactatattattggactatttaattctcgagtctcactgtcttcaagacattgataagaactaactttgcaggttatactttcttattcttttagttgattgctttcagttttctgtgagggttcctttcattagaaaatatcttgataccttgatgacataaaaggacacacacacgagtgatttgagagtgccaattttacccccttttcctcccctctccatcctgcggggtggatctccttctctagggtgatcccttgatgatgatggatgaggagatctcagtgatagatggagatgaaggtaaatttctaagtcaacttgtatgggttggtggaattgggaaattgaccaaattctctcctttactgggatttctaagagctttgcctttgggtgggttgaaataccactattatctctactatctttcctgtacttgttgtttattctactttgcttcccacagcccaggtgacccaacagccaggccatctattctggcctccaggctctgctttgacggctaggcttcggcgcctagtaacagcctatcagcgcagctataagagagaacagatgaagatagaggctgcagaacgtggggataggagaaggcgacgttgtgaggcagccttcaagctaaaagaaatcgcacggcgggagaaacagcaacggtaaaatgtggctgggaatttggactaagctgtaaacttctcttcaactatgggccctatattgaaaagcatctttggaaggattatggcatccctattggctcagatggtaaagaatctgcttacaatgccggagacctaggtttgatccctgggtcaggaagatcccctggagaagggaatggctacccattccagtattcttgtctggagaattccatggacagaggagcgtggagggctacagtctgtggggttgcaaagagttggacatgactgagcaactaacactttcacttttcacagagggaccacttcttttgcctttgttatacatctgcaacccatacttaacccctataaaaccatacttaacccctgtaaaaccatacttaacccctgtaaaaccatacttaacccctgtaaaaccatacttaaccgtaactcctgggaaagtcttgtacatagtcatcctcatggagttgtttgcatcattttcccccttagcttgctaattcttaaattattccttgttataaactacctcttctgctctttgggggctccctgcccgccccccccccacttccctgccaactttcattttttgtgtgttcaaatattccacgctatactaagaagtaaccagtccgtgggttctgatcactattgccttattcgtcttccctttgtagatggacaaggcgtgagcaaactgatttctatcgagtggtttctacctttggtgtggagtatgaccctgataccatgcagttccattgggatcgcttccgtacttttgcccgactggacaaaaaaacagatgaaagccttaccaaatatttccatggctttgtggccatgtgccgccaagtgtgccgccttcccccagcagctggagatggtaagcaagactgaagatcttgagtgagtgggcatggattgtgacagaaccagctctgggttcatttcttcttctacccttatctcttgcagaacccccggaccctaatctgtttattgagcccatcactgaggaaagggcctcacggactctctaccgtattgaattgcttcggcgcttacgggaacaagttttatgccaccctcttttggaagatcggctggcattatgtcagcctccaggtcctgaattgcccaagtggtgggagcccattcggcatgacggggagcttctacgaggggcagcccgccacggggtgagccaaacagactgcaacatcatgcaggacccagacttttctttcctggctgcccgtatgaattatatgcagaaccatcaggcaggagcaccagctccatccctgtcacgctgctctactccactgctccaccagcagtacacctcacgcactgcctcaccactgcccctgcgcccagatgctcctgttgaaaagccacctgaggagacagctgcccaggtccccagtctggagagtctgactttaaagctagagcatgaggtggtggccaggagccgaccaaccccacaagactatgagatgcgagtagccccctctgatactacccctctggtctcccgaagtgttccaccagtcaaactggaggatgaggatgattcagactctgagttggacttgagcaagctgtcaccatcatcctcttcttcctcatcctcatccagctccagctccagcactgatgagagtgaggacgagaaggaagagaagctaagtgagtgcatgtgacaggctgttggccgtcttccccattcccccctctctgcatttcccttcttttctaaatgcattttctaagattccgattttaatttgatagaatatcagaagagatctgttactcttagggcctttatttaaagtctatacaataccattcctatgtaactttattcttccacctttgctcacatgttctgtgtgatcaatccctagctgctgaccagtcctgctcaaagctctatgatgaagagagtctcctgtcccttcctatgtcccaagatggattcccaaatgaagatggagaacaaatgacccctgagcttctgctgctacaagaaagacagagagcttctgagtggcccaaggtaacagcctcattactggacatgttgagtctgaaaatatagcatgatacagccactatggagaatagtatggagattctttaaaaaactaggattaaaactaccatatgacccagcaatcccactactgggcatattctctcaggaaaccataattgaaaaaaagacacatgtatcctaatattcattgcagcactacttacaatagctaggacatggaagcaacctagatgtccaccaacagatgaatggataaagacgtgctacgtatatacaatggaatattactcatccataaaaaggaacaagagttcagtcatttctaatgaggtggatgaacctagagcctattgtacaaagtgaactaaatcagagagagaaagacaaataccatatattaacacatatatatggaatctagaaagatggaactaatgaaattatttgcagtgcagcaatgaagacacagacatgaagaacagacttttggtcacaggaagggagagagtgggatgacttgagagactagtgttgaaacactggttaacgtacattactgtaaaatagaaagccagtgggaatttgctgtatgattcaggaaacacaaagccagtgctctgtgacaacctagatgggtagagtggggagggaggtgggagggcaatttaagccagaggggacatatgtctgtggctgattcttgttgatgtatggcagaaaccgtcacaatactataaagtaatttatcctccaatgaaaaataaaattctaaagagagtgacatatacagagaacaagtagatggttctaggtctcttcaattatgtttagtggtacatgttttttcatgaagctcttacctgtcgactttgggttctgatactattacctccctcatttttgacatataatttttacttatcttaatgatggtgcaattacttgtcacaggatcacatgactaattgatttctttttctctcactcaggatcgtgtcctgataaaccgtattgacctcgtctgccaggctgtactctcagggaagtggccttctaatcgccggagccaggaaatggtaacaggaggaattttggggccaggcaaccacttgctggacagtccctcattgactccaggagaatatggtgactctccagtccccacaccacgaagtagcagcgcagcttccatggcagaagaggaagtgtctgcagtcaccacagcagcagctcagttcaccaaacttcgccgaggcatggatgagaaggagtttacggttcagatcaaagatgtaagctgagcatttaggcactgggaagtgaggaaggaggctgtaattcttgttaactagttttatgaacataacattaatattaagctcatttggtcagctaaccttaaaaatgagcagagaaaaaagaaattagagctcacaaagatccgttgaggaaaagtcactgaagtaaaggaagggatcttatgttgacttgtatctcttgtgagtgcttagtcactcagttgtctccgactctttgtgaccccatagactgtagcacgccaggcttctctgtccatggggattctccaggcaggaatactggagtgggttgccatgccctcctccaggggatcttcccaacccagggatcgaacccaggtctcccacattgcaggtggattctttaccatctgagccaccagggaagtcccaagaatactggagtgggtagcctatcccttctacaggggatctttccaacccaggaatcgaaccggggtctcctgcattgtaggcagattctttaccagctgagctaccagggaagcccttgtatctcctagtggctagattaaaagggttcttttgagtgtcttgcttatagaccctagaaacttagtttttaaaaattgaaatcaaattatggaaaagatattaaaatgatactaaagtgttatgggccttattaaaaataaaaagaaattattcctactgaaattaaatcagtattgtttgggaaatggatggaaattttatttttcctgatgctcttccctaatgaaccctagtagatggttattaagtattcaacaagaaaaatgttttagttacataacaggaatatcaggattttgcccctatgatgagttgccatgctaattctgagacaccaggtaggggatttttccctgcattgggtgttactgagataaattctacttctcttaaatcaacctgaggggcactgagtcaagaaatgaagtctttctaaggaaaaatatatgtcttaattgtatttctagtttgcacccattagtcagatggccttccttctcaccatcattgaaccagaggatgacccttacttaattccttctaaagttaatctttgttttaaaaacatgctatgtgacgtcttggatgggtcgggtgtctttctaggaggaaggattgaagttaacattccaaaagcacaagttgatggctaatggagtaatgggagatggacatcctctttttcataagaagaaagggaacagaaagaagctagttgaggtaagtggtagacaaagtctttaacatgatgattagataaaatctttctgttcccagtaactgatgaaggcagttgggattgagggagtagaagatactattttctggctaccattggctctgctccccctccctccctactcataacagtgtgtgctcatgggggtggattctgggtttgcagctggaggtggagtgcatggaagagcctaatcaccttgatgtggacctggagacccggatccctgtcatcaataaggtggatggtactttgctcgtgggtgaggatgcccctcgccgggctgaactggagatgtggttacagggtcatccagagtttgctgtcgatccccgatttctagcggtgagtggcagttccatccagctagatttaaagtcattcccttgatatttaagctgtgtgagagggaagaagcatgccatattatgtcattgtttctgcatcggcaaaataagagtaattatactcagtctttctatttcacagagtcgttgtgaggatcaaaataatgttccagtacttgttaaactaaatgctaggcactgagctagatataatcacctaatttttttggagaagtctgcttgatggcagttttccactaggattaatcctttattcacacaataagcattatggtcagaatagacactagtaccttaataattactccagagaagttttattcttttaggataactgcaacttttctcttatagtatatggaggatcgcagaaaacagaaatggcagaggtataaaaaaaacaataaggcagaattgaactgtttgggaatagaaccagtacagacagctaactctagaaatggaaaaaaggtgagtgaaactgagatattaccactctgttcccaggctaggtatgactagagaaattatttaatgttgtttatcttcttttcccctgtatgtttgagaaaatttatcctcagttcacaaagaagccataatatttttattgatatttttatggtcctgtagtatcctcatctctagaagagcatgaaattctaaaagctaactttagcacttcaagcatattaaaatgtaagaattagtaagacatgttagaaaattcagtgctttatcctgcttttctatgacttaagggattttgggcaaatccttttaactttttcaatttgtatatcctgaaaaattgaaggtttgggagcagataatctcttaaaagttttatattttagaagtgatttgggaaattctctagcagtccagtggttaggactctgtgctttcactgctgagggcctggggttcagtccctgatgagggaacctgcaaagctgcacagcacagcccccctcaagaagtgatttggaacctattaaaacagccatgttttaataggcttctcaacacagaagatgttgagaatcattaataatatgccagtaatggaaaaagacaggaaatcatgttctatagtttataacaacaattttggtcattatgttattccatgatttgcaagtgtacttatacttttatatggttatagatttggtagattaagaacccataatcctttccatcaaaatataactgcaaaagtttcccttggctatgtttcccttactttggacaatagttgtgtaaatataaacatataaatcagggtttggtaaacatttaaatggattaatactttgtatattcactttaatcattccccttttgattttctatatacatgtgtatgtatgtgtgtatatatatatatatatatatatatatatatataaccacatggtttattttttaacaaaatttccaaatgaaaaatatccatcatttgcatttaacgaattctgagaacattattttgcccataagatatatttatttgtgaggtgaatttataaggtgtattgtttttatactaggtgaaagttgtttcatacaaatattgttgccatggaagaatgtttttttctctcttatcctccatgggcccaagggtttgataagcagagtggttgatatgggaggctgatggcaagaaggctgataccatctctgtgttgaatttagcattacagagcagccggtaaagaaggctttttctccaggattacctatttttgcctcaagtacttttgctcttctttataatcagttgttaactctaagaaagaaaaagatcatagcaaatcacagaaaattataatgtgattagtacaatattcttattgcagaattgatcatgtatctagcattgtattattattgcatcctaatgtgatttggtgctattatgtgaaagtatgttagttgctcagtcgtatccaattctctttgaccccatggactagcccactaggctcctctgtccatggggtttttccaggcaaaaatactggagtgggttgccattctcttctccgggggttcttcctgacccaggggatcgaacctgggtctcctgcattgcaggcagattatttaccatctgagctaccagggaaaccctggtagttattacagttacattttagaagcctaaaaaattaagtattaagatgtttgtaactgtctgagtttaatcccagtttactcagtattgtacttaggtctagtaatgttccagcttctgtgaacttaaccagaatttattgtgagctcatttacatgaaacaattcaaaattcagcagatatataagtttattatagtgaggaaaaaaattagtttagtaaattttctaaggagctatcccgtagtctttttggtgttctatacatctagactcttaatctggtctgtcttgtgtttaccccattctgatgcaataatgaaggataatattgattatgtcagtatggtcgtactgtccttcacatggtaagatcaggtgaacaatccgccatcaggagagcatactgtataagtactgattcattcattgtcttactcaggcttcttattaacaaaaataataagcaattttgaaatggttggctagagtaaaggtatagtgtagtcgtggggaaaaaatcaaagctctggttgagatgagtgtcagtgtcaaatctttgcgtttagcttcaacatcctaatgtttcaacctgctacatccagctttacctccattaccatcaagtctgattggactgtacttactttgcccctcctaaaggtagttcagtgaaaaagcatttgcaagctaggactctgttgacttctattttgttttttcttccatttactatcttctgttccttcttcccagggtcatcatactgaaactgtgttgaaccgggttttgccagggcctattgcaccagacagcagcaagaagcgggcccgtaggacgcgaccagacctttctaagatgatggccctgatgcagggtggaggcactgggtccctgtctctgcataataccttccaacacagcagtagtggcctgcaatctgtgtcatctctgggtcacagcagtgccacttctgcatctttgccttttatgccgtttgtgatgggtggtgcagcatcatcccctcatgtagactccagcaccatgcttcatcaccaccaccaccacccccacccccaccatcaccaccatcaccatccaggcctgagagccactggctacccttcttcaccagccactaccacctctgctactgccttgaggttgccaccactgcaacctgaggaggaggaggacgatgaggatgaagatgatgatgatgatttatctcagggctatgatagctcagaaagggacttctcactcattgatgatcctatgatgccagccaactcagactccagcgaagatgctgatgactgaagacccagcatggtccccattgcttgggtggctgctgtatttcatttactctggcccttggactatggaaaagtgggaggggcaggggagatgtggggagacccaggactccaggaggtgaaaaggaaaaagaacacttgtacctgattgcttccaaatttgagaggattgggtgggtaggggaactcctaaaataatacatgattacttcctcggttctggggaaggaaaggagactagagcagccaacgtgctcacccctccctagacacctccattaaccacagactatgtagcgctggcactagcctctggcagagcctgttcctgaccgaactgtggatacagctggagagtcaggaactgttaccttccttccccttggcattaataaatttaagttaatcctttcccactcttccctcgttctatatttgctcaaacccaatataaatattaccagttgatgttcatgatgggtaatttcaacaccactttct

SEQ ID NO: 228 - DNA, 3157 bp, Hippotragus leucophaeus
  source 1..3157: mol_type = genomic DNA
gtctgacattatccacactgatggtgtgaaatggcaactctgtgtggctgccatttgcatttccttaatggccagcaaagcccaacatctcttcaggtgctcaccagcattttaccttgttcttctttgagataatctattcaacccccttgctcattttgtggacttgtctgccttgtttttcattgactttggggttggggggagccggggttggggggacccaccccgcggcttgcacagtcttgaacctgaaccacggcagtgaaagcgccaaggtcctaaccacctgaacgccaaggaacgtccctcactgacttctgaaatatcactctatggagataaatggacaccccgtcaatttacccattcaaagagaacaactgagaggcgaagctcgctcccatttttgtgcaggcgagcgtcgcggcccagagtctgcactcagcccctcccgtgcccccacaccccagagccgaccgcgtctcttcggtccacagccgccgcggaaaccgcagagctgaaaccgcagagcttcccgcggatgcggagcctgggcctcgcccctccgaccgcggagcaccgagagcagtcctccagcagccctagagcggcccgtggagaagggtagggcgtggcgagcgtcacctctcagtcggttccgggaaccaggccctgcctccggctatttgcggtgctgctccaggctcaggactgggtgtaaggtgcgggctgcggggtgggagagggctgccctgcctgcggaacggcgagcgcccgggaggcaggaagccgatatggcagttcagggcggggacgaaggtcgctgaccgctggtgggacggtggctccgtcgaagcttggaggctgcctcgggggctcttttctccgagcctggaggcagctcacgggcctcccgggagcggagcccgagcggccggcagcggggcagtggacggttgtcctggcacaggccaggccctgagggaaaacccggaattcgggcagtggctggtcgctgacgaccggggtgaggggcgctcggccttcctggagagcgaggtgcgaggaagcctggagagctcccctttcccccgggccgccttgctgaggacggctctgcgaactcatgtgtgctctccttttcctggttctcttccttttctcctcctcacctcatctccgttttcagctgctttctgcctcccctcttgcagggactagagagggctttctgccacatgattccagggcacctcctgtcacactggctgtcatcagtggttcatagcatcagcatctgggaggtggagaccctgtcagtcctaattctctggcccaaagggtgtgggggtcactgggcttctctcacaccccttccaggccggctcgactgagacctcctactaggctgcctgtcaaagagcaggaagcatcgatgtctgctgtgggtcctgccgctgcacacctgcatcgccctggtgacagtcacagtgactatgtgagtttcctgggggcccagttgccccctgaggtggcagcaatgccccagctcctgggcgacttggatagggccacgttcagaaaattgctgaagctggtggtcagcagcctgcagggagaagactgccgggaggctgtgcagcacctcagggctggcaccgacctgcctgaggagcagctgggtgccctgatagctggcacacacaccctgctccagcaggccctccggctgcccccagccagcctgaagcccgacaccttcaagaaccagctccaggagctttgcatcccccaagacctggttgtggacttggccagcgtggtgtttggtagccagcggcctctacttgactctgtggccaggcagcagggggcctggctgccccacgtcgccgactttcggtggagggtggacgtggccatctccaccagcgccttggcccgctccctgcagccgagcgtcctgatgcacctgaagctctcggatgggtccgccctccgctttgaggttcccacggccaaattccaggagctgcggtttgctgtggccctggtcctgaaggagatggccgacctggagaagaggtgcgagcgcaagctgcaggactgagcctctcgccagtgcctctggttgcccaggcggctgtctcagatgggctctccagagcgaagcccgcccttctgagaagggactccagtgagggagtgtaaccatgtctttctctaagtgaagtagacagctgtgtctttccctttttttggaagtaaagcaactgtaaaaaaaaaaaaagtcctcctgggtaggcatcaaaccgcatgcaccctctccacaccctttccacagtggtcagtctgtcttcctgccaggtaagggcacccactgcgctggtgggcccacgtgtggtctggggttcaggccaaggcctttgtgaggacacaggctgttcagcctgccttgtgcagcatccgagctgttgctcctttgctcttggaaaccctatgtttcagggtgcatatttcattccccgtcttaaatccctgaccttaaagcgcattctagtggagggggtgcggggagaaatgtgtaataaaaacaagcagtgtagcttgggagagggtaagcgctgcaggaggtgcagcagcctccagagatgggaggcagggcggtgggatagctgggctgcactttaaatcaggtcttggggtgggtctcctgaggacgtggttcttgagccaacaggaggcagggacactgctcggagggaaagcctgtgggcgcagggctgcagccaagtgggaggagatgagtggaagcgcaggggcaggccgagggcctctctgggaactcggctcaactctgagtgaaatgcgtcgatagacgtgttagaggatcacactggatactgtgttgactgcagagggcaggccgcaggatggggtgaggagtctggagttggtggtggcggcggagaggggagcgggggcctcgcctaggtttcttgcagctgggtggctcaggcagctcagaccgccatagaccaagtggcttgaacaacagaaatgacttgcttgcagttctggaggctggggtcagcgtgccagcagggtcaggtcctggtgaggcctctcccctgacctttagacttgcctctgt

SEQ ID NO: 229 - DNA, 33616 bp, Hippotragus leucophaeus
  source 1..33616: mol_type = genomic DNA
ggcagtctcccttatcacctccttgaaggcaacgcaatagcctagcgccgcttcgcgccgcacagcctgacgggagcctcagcctgcgggcacgggcggcgccctcggcgcgtccctggccacgcccccttcccccgcggggcacgtcgggagagccgagtttaccccctccccctggtcaacgggcgagaagaagaggcatttccggcgtcaagactggtctttgcggaaggggtggggtttcctcgatcccgcccctcacgcccgggggaggccgggccgagagtgacagtcctcgacccacgctaaggcccgcccctgcgccggaaggaagaagagtggggggagggaggtgtcgcactggccgcgggagcagggtcacgtgatgctgctgctggcggggagaagggggcggggccccgggcggaggggcggggcgagtcctcccagcctttcggtcacgcgcggcaggaagtggtgcgcggggaggagtattcacgatggggaccaccctggacattaagattaaaagagcgaacaaggtttatcacgccggggtaagtgggggaatgggcgggcctgcaggttctgtggtctcctcgggtctggcacacttcggagttttcctgggcgggtgcgtccgggtcaggtgggagcagccaggtgcatcctccgccaggtgcgtcccccaccaggtgcgtcttgcctgcgcggctggctgctctgcagcggcgtcccccggggttgccgccgcggttggggggcgtgcagggcgcctgggctgcagcgcgcaacagtctggccccttggacatccagcctggccgggggcttgagctgtgacttagcactgcggtctgaggagctcaaccaccagacgctccgtttctcgcttgtaagaggaatgcaaaggtctagggccagaaagacagatgtaaccttggaagcagaaatacactctgtaggcggtacaaaagttactcgtttctctggttttggggactgaaggaattgcatgttaaaatgcaaattaaaaaaaaaattttaacgatgccatgaacaagttttgtgccatagcctcttaatctcctcgggtgccagtttccttatttgccaaaggagaatgcaaggtttttctccctctaactagggcaatctcaacccttactgtaactaaatcaaaatccataaccctgggaatatacgctgaccggggtttcatacctagagacccctgtgattctggcccctgtgcagccgggttgaaatcgcagccaactctatgagtatgtggaataaaactgagaggagtggttggtcatgtggcatgcagcgagggttcaaaagggatgcttaaagcctttgggggcaagaccattgaggaaactaaatgtttacacagatgcaagacagtttgattatctccagattattaatgacagagggaaaaagctacgtttatagtgcaagaatcggacagtccctgtcctaaccaagacctgtggtgataccaccttaccaccacagttgacgcgctctggcacaataaaagaggattttggtagggagcactgaaggaagatacgactcagctatgtggtgttcctgctgaaaatgcctaacttttcttagttcatagggaaacaggcatgttcacaattgagaaacattctgtgcatttattggcctggattcttcagatatgtcagtgtcattaaaaggtcaggacatttttattttttaagattcaagagatgacagggatgtaacaaccaaatatgatacctaatttttgataaatttgaatatgggctatatgttaaataagagctttaaattcccccagtctgatgttcatattttggttatgtgggcgactgctctacatgctgaagtatttaggagtaaagtgtaataataactaaattttaaatgacctggtcataaattgtgtgtgtgtgtgtgcgcacgcacgtgcatgtggggagaaagaaagcaacagcgccaacatactaacagttgctgactctgcttgaaagccttatgggtctaatttgatgtctttaaaaaaaaagctttattgcaatctaataccataaaattcactcttttcaagtgtataattcagtggttttaatatactcaagagttgtgcaaccatcacacccgtctaatcttagaacatttttatcaccccttccccggaagaaacactgcacccagaatccttccttcctcattccctctccctcttagacccaggcaatcacagacctgttttctgtctcagtgaatttgcctgattaggacatggtcgtgtatataggattgtacaatctgtggtcttttgtgactgacttctttcacttatgagtgaactctgaacacattatgctgctgtagctgatatcagttcctcatttgtttccatggctcagtggtattctgttgtgtggatacgtcacattttatttatccattcatctgttgatggacatttgggttctcactttttgactattatgattaatgctactttgaacagcattaatctaatacaggtttttgtgtgaacatatgttccatttctcttggatatataccttggagtggatttgctgggtaatatgctaaacagtgtcagactttattttggggggctccaaaatcactgcagatggtgactgcagccataaaattaaaagatgcttactccttggaagaaaagttatgaccaacccagatagcatattgaaaagcagagacattactttgccaacaaaggtctatctgtcaaggctatggtttttccattagtcatgtatggatgcgagagttggactgtgaagaaggctgaatgctgaagaattgatgcttttgaactgtggtgttggagaagactcttgcgaatcccttggactgcaaggagatccaaccagtccattctgaaggagatcagccttgggtgttctttggagggaatgatgctgaagctgaaactccagtactttggccacctcatgcgaagagttgactgattggaaaagactctgatgctgggagggactggggacaggaggagaaggggatgacagaggatgagatggctggatggcgtcactgactcaatggacgtgagtctgggtgaactccgggagctggtgatagacagggaggcctggcgtgctgcgattcatggggtcgcaaagagtcggacacgactgagtgactgagcaactgaactgaactgaactgaatgctaactttggctcagtggtaaagaacccacccatcagtgcaagagatgtgggttcagtccctgggtcaggaagatcgatggggaaggaaatgacaacccactccaatcttcttgcctggaaaatctcatggacaggggagcctggtgggctacagttcatggggtcccaaagggttgggcgtgacttagtgactcaacaacgctaactttatattaggtatttaagggccttccaaacagttttctgaagcacctgcatagttttacgttcttaccgttattgtgtgagggtttcagttttctcggtactttgtattttcttaacttttctgtattttagaaaataccaaaagtaagaattgggaagacttccctggtggtccagctgttaagactttgtgcttccactgtaggagtcaaagattcaatccctggtcagggaactaagatcccgcatactgtacagtgcagtcaaaaggtaaaaaaataaatgaatttgaaaaggggggggtagggccaggcagtatgtacatttagttttaggacttattattttccttcaaaagatgacacattttattctgagatgttacagcagctgggatgttttctgtgttttaaagtatggtagaagcagtaaaagttccgttcagtcgctcagtcgtgtccgactctcttcgacgccatgggctgcagcacgccaggcctccctgtccatcaccagctcctggagttcactcagacttatgtccatggtgtcggtgttgccatccagccatctcttcctctgtcgtccccttctcccgccttcagtcttggcatcagggtcttttccaaggagtcagttcttcgtatcaggtggccaaagtactggagtttcagcttcaggatcggtccttcctatagatggtgtatgcattactaatagcagatgtcaaaaaccaagagatgctgtgaaacggaaattcctcagaatgtgggctcctgagtctgtttctgtgcttttcaggctcttagttattatggaagcgtgtgagaatgattttggttctgtggacactgagagcctaagttatactggggttttaaaattgtcatttaggtggttttcctcgaaaaggatgctcattcaagatggtagtgcttgttcccccgcccccccttccccccacaaatcacagttgaatcatttttttttaatatatatataaacacaggattttacagaaggctgggaagtgaaaagtcgggttcctcctctttccgaccctttttctgtccttggagggacccgttgactctgtgtgtgttcttgcgccagacgttgtctgtgagcaggagtggcacatgtgcgcagactcgcacgcagatgcaaaacgtaacctttttgctgagccgtgtagcctggctgtgcacgcctttccatatcatcacatcgtcatcagttccttctttttagactgttaaagcagatttattcaacccgtgtctgtggatctcctgatagaggtaaacataccctcacttgtgctccaggggtgcgtctctgtgtaagggagcgcagagggaggtgtagttgtttgtgggtggtggggggcagggcccttctggagcttcattgagaaggtgaggctccaacctagtgttgaaagctaagtgctgggccagggtctccctctacccccccaccccctcagccctatttgtttccagaagaagaaacagacaatagaagcaaagagagcaggatctgggagacactggcaaagccatccaagtccacaaactggcttctcttattcttatttccctacctcttatagctgctcaccctcatctcatttgtcagtgactttttaaagagactttgctaccttgtctttccagaatatttttcttttccttgggtttattcccctcttctcatgtttattgtttgtttgttcattttcatattttaacttcataaattggctgtttggtttactaaattgtagcccttttaaaaaaagaaggctttttcttcctaagtgcaacttctccaggtcttaattctcatctggaggatgagtctgagcctgctcagagactttgtcgtgagaattaaatgagataatgtttgaagatatttactatagcttcagactcaagtgaagtgaaagttgctcagtcgtgtccgactctttgcgaccccatagactatacagtccatggaattctccagaccaggatactgaagtgggtagcctttcccttctccagggccaggggatcttcccaacccaagaattgaacccaagcctcctgcattgcagacagattctttaccagctgagctgtgagggaggggtcaaatggtaggtggtggtagcgccccgcttttccatgacttcagagtcgctgatgtcaatcacgttgttcatgcacctcacacatggcgtggtgtgcgctcgtcagacgcggcagtgactggtggatgcgtccccgctgcagactggccgtgactttggcatccctgtgtacttcttcgctcagtgaggtaggtgtgttcttgaaccaaaagtttgactcaaatgcattgtacattacactgtattggttcaaagaaccctgcagtaaatatttttgtaatgtaaatatggtttatttgtttttataaattcaaaatgttttacattctgaaatcctggcccacatactcatgaaaatgacactgtttaatattatggttgtgaaaaacatcagtgggaggtttactgcccagcgtagccaggttgcagtgatgaggaatttgtgcacagtgggctgattactgttaccacaagaacatctaggtttgcattgtgtcttactggctttcatgtaatttcttgttaaaaaaaaaagattaaagaggaaaaatccttattatgccagttcattattttgaagaaaaattgcaaagctaggatgttgtggaaaaaacctcagtattctgctggattcttgatacattaatggtcagttttagtgaatgctggtgcagatccttggggtaggactttgacctaggaggaatctcaggataattttgtgggaggtgtgaaccttttaaggaacacagttatctaaaccttaagtgagtcttttttctcactaattatctaatactcctgaaaaggcttgtcttctcaatcatatcccagcacttagatgatgcatgagaagtattttcagttacccaaggctgtttgaaccctgggacatggtgagagtgttcattagtggcctgtttggtgtttgttgcagcaaattctgtcctggcgggaagattactgatcaagttccctaacttcagattatgttacaaagctctggaacagtgtggtactggccccaaaacagaaatacaaatgaatggacaggatagaacacccagaaataaacccacgcacatctggttaattaatctatgacaaagaaagcaagaatattcaatgtagaaaacacagtctccttgataagtggtgctgggaaaactggactgctacatgtaaaagaatgaaattagaacattctctaatacgatacacagaaataaacttgaaatggattaaatacgtcaatgttagactggatactataaaactagaggaaaacataggcagaacacttcttgacatacatctctacaatatctttttggatctatctcctagagtaatggaaataaaaacaaaaccaaatgggacctaattaaacttataagctttttgcacagcaaagaaaaccatttacaaaaaaaatagagaatgggagaaaatatttgcaaatgatgtgaataacaagagattcatctccaaaatatacaaaagtctcctagagctcagtgtcaaaaaacaacccatccagaaaacgggcagaagatctaaatagacatttctccaaagaagacttacagagggtaaaaaggtccgtgaaaagatggtcagcattgccagttattagaaaaatgtgaatcaaaactgcaatgagattccatctcacaccaattggaatggccatcctcaaaaagtctacaagtagcacacctggagaaggtatggagagaagggagccctcctactccatgggtgggaatgtaaactggtacagccacgatggagaacagcatggagggtcctcaaaaactaaagatagagcgattctgtgatcgagcagtcccactcctgaccgtatatccagagaaaaccatactttgaaaagatgcatgccctctcaatggggcatgcattattctcaataactaagacatggaaaccacctaaatgtccatcaacggtggtagatatataactatggaatactactcaggcataaaaaagtgaaagaatgccatttgcataacatcagttcagttcagttgctcagtcatgtccgactctttgccaccccatggattgcagcacgccaggcctccctgtccatcaccaactcccggagtttactcaaactcatgcccattgagttggtgatgtcatccaactgtctcattctctgtcttccccttctcccgccttcaatctttcccagcatcagggtcttttccagtgagttggttcttcgaatcagggggccatagtattggcgtttcagcttcagcatcagtctttccaaaaaatattcaggactgatttccttgaggattgacgggtttgatctccttgcaatccaagggattctcaagaatcttctccagcaccacagttccaaagcatcaattcttcggcgctcagctttgtttatagtctagctctcacatccatacatgaccactggaaaaaccatagccttgactagacggacctttgttggcaaagtaatgtcttgctgctttttaatatgctgtctaggttggtcataacttttcttccaaggagaaagtgtcttttaatttcatggctgcagtcaccatctgcagtgattttgtagccccccccaaaataagagtaaaatggatggacctaaaaactatcatctgagtgaagtcagacagagacaaatatcatgtgataccacttatgtgtggaatctggaaaaattatgcaaatgaacttatttacaaagcagactcagaaaacaaacttatggctgttaaagtttatgcagagggataaattaggagtttgggatgaaaatatatataaaatagatattaataactaccaaagacctactgtatagtgcaggtaactatactcagttaacttgtaataacctataatggaagagaatgtaagaaaagaatatatatgtatagctgaatcactttatacctgaaactaacacaacattgtaaatcactatatttcaataaaaattttttttaaatattgtctttttttttttttttgtctatatggaacagacagtctgctcttcattcatacgctggagaaaattcaggctcagagaaatggtgcttttctcaaagtgatggaaattatatctcccttcatcccacaaactacagtgaatgtttcctcataaacagttcaagataatgagcattgtttaggataaagagttcacccgcctccttccagttctaagcaatgagacttttattaaatgaaatcttaccaaattagctttctaatacatcagttttaataaatctgctgctgctgcttcagtcgcgtccaactctgcgtccccatagatggcagcccaccaggctcctccgtccctgggattctccaggcaagaacactggagtggggttaataaatctaatatccattaaaatagttccttttataagcagataatagcagagcttttgcatttgaagtgaccctcccaccctgccctccctaacacttcctcagttcccaaagtggctgctgaagcatcagcacacagcaggggcccactggttcacagtttgaaaagtgctagttgtagtatgtaatgaccagccaaagccaatgaggttgaagtttcttaatatcaacccattttattttgttttgtgccaaaacctgtagggcctgttaacttttttaatgcagtacagtgcagccaggcttaaaatgttttgcttttatttactggaggattaaagtaaaaaaaaaaaaaaaaacaacgtcgccccctacaccatacagattttcagcccacaatccgtgattaccaaggttaactgtggactgaccatccgaggttaatcacctgccagtttccctcttgaatcctgcttacctgaggttcttgggccaggagagccagcagaagctggtgggctctgtccacctcactcttctcctgggtgtttaaacgtacccagggaagggcagtaggaggttgtcggtagcctttaactcttgttgggaccctgtacctgattgtacctgacttatctcctctgactgatgctcagaagggatttctgagctcagaaagggctctcccctgaggaaccgggagggttacaccagctgtcctcccagctgcccggcaggttcttttggtgaccttggtgtccgtgctttctggtgatgcctgggctctgttcatcctcactaccctgtccgcggtggtgttcttacccatgctcatggtttcactgtcagactgcagccacatgaaggatacagatggtaaagaatctgcctgctaggcgggagactcgagttcgatccccgggtcaggaagatcccctggaggaggaaatggcagccactccaatattttcgcctggagaatcccatggacagaggagcctcgtgggctaccgttcatggggtcacagtcagacgtgactgagagactaacagttccacagcaggcacgacatctgccaaaacctggcctgccttttgtttcacaagaagagatcgtttaagactgttaactctaaaatgcaaacatccccttttggaaaggagtagaaatcccatcagtggaaaagtaaggggtgaatggacagaaatgcctttcttcaataataatcgggttggggagaggggaacaaccttcttaaaatgaaaaaagtttttttgtttcgtaaatttcaaaagaaattgttttatacgttaaaaggattgttttaacttgctgagaacaagtaacagggactatcagatgggaagtgttctgtgccccccgccactgctccacgcgcagttcccgggactgacgctccgcgctctcagcctcctccacgggatgcacggtggtgctgggagctgcggggcccttggtggggcgggggcgggggcgacccctcctctcctgggcaccgggcacccctttgccctcaacagcccttgggccgtgggcgcacccctccgccgctggccctggagcctgcctactgcgtgggtttggatggcgcactatcctcactcatgcatgcgtttccctccgactgcggttcagtttggtggctgctgttcattccttaagtgagcgctggctactcagagcctttcccttggccagctgcctgtattccacagtcattactttgccctgtaatcaggccatctctgaaacgcctctgtggtcagagttctgaacctcttgggttgtataatctggagtctttagattcacttaggtgagtagtttcaaacgaactggtgtaaagtttctcttgagtttttacgttattgacatctgaaagccagtcatctctattaactcgtacttttgtgagtatgtggtgacccctgaaaccacagtgcacaccatgattcgattttaatattcctgtgcttaggacctcgtatttacttaactgatttttcctttttttaactggtattggcaatctcattttgccccattcttctaaacttttattcagggactcaggtttcttttccagattttcaagaaaatttcacaactagaaatttcagagatggcttcatcagacaatagctgtgatttttgtcatcctattttcctaagtattgagacctgtatttacaccctactgagcaactgaactgaactgaactgaactgaactaagaagaagcctgcttacaacagcatccttattacaatagcatcagaatgcagtactaaaatataagacccctgaaaaaagcagagacatttctttatcaacaaaggtccatctcatcaaggctatggtttttccagcggtcatgtatggatgtgagagttggactgtgaagaaagctgagcgccaaagaattgatgcttttgaactgtggtgttggagaagactcttgagagtcccttggactgcaaggagatccaaccaagtccatcctaaaggagatcagtcctgggtgttcattggaaggactgatgttgaagctgaaactgcaatacttgggctacctgatgtgaagaactgactcatttgtaaagaccctgatgctaggaaagattgacggcaggaagagaaggggatgacagaggatgagatggttgcatggcatcactgactcaatggacatgagtttgagtacactccaggagttggtgatggacagggaggcctggcgtgctgcggtccatggggtcacaaagagttggagacgactgagcgactgaactgaactgagaacaggggctttgccttgtttgtttttgcctgtgctgggtgtgtgtggctgtgcatgggctttctctagctgcagcgagggggaccacgcttcattgaggtgcacaggcttcttgttgcagtggcttctgttgttgcccagtgccggctctagagtgcgggattcaggtagctgtggcactcaggcttagtttctctggtgcatctggggtcttcctcaaccagagattgaacctgtttccatgagttccaaaaggaatgtctgtgccctccactgtccatcaaggtcctcttctatgggacaactaaaacctcttgatgtctagtgatttctgtcaaagatattttaggcatatcaagtaaatacatataaaggttctttttctacccccttttcacagtggtgcaatatgaaagtgaaagtttctcagtcatgtccaactccttgtgactgcatggactcttggaattctccaggccagaatactggattaggtagcatttccctactccaggggatcttcccaacccagggatcgaacccaggtccccacattacaggtggattctttaccagcttagccatagttcagtcactcagtcgtgtccaactctttgcaaccccatggactacagcacaccaggcttccctgtccatcaccaactccaggaacttgctcaaactcatgtccatcaagttggtgatgccattcaagcatctcatcctctgtcatccccttctcctcctgccttcaatctttctcagcatcaggatcttttccagtgagtcagctctttgcatcaggtggccaaagtattggagtttcagcttcagcatcagtccttctaatgaaagtccttccaatgaatattcaggactgatctactttaggatggactggttggatctccttgcagtccaagggactctcaagagtcttctccaacaccacagttcaaaagcatcaattcttcggcgctcagctttcttcacagtccaactctcacatccacacatgactactggaaaaaccatagctttgactagatgaacctttgttggcaaagtaatgtctctgctttttaatatattgtctaggttggtcacagcttttcttccaaggagcaagcgtcttcatttcatggctacagtcactatctgcagtgatttggagcttagccacaagggaagccccaaaaccatgacccatgacctttctcttaatttaaagagacgggttgtctggtaggcagaaagtgcctttttggaagtggtggtggtggtggtggtggtggtgtttagtcgctcagtcatgtctgattccttgtgaccccacggactgtagcccaccaggctcctgtccatgggattctctaggcgagaatactgaatgggtgggttgccatttccttctccaggagatcttcccaacccaggaattgaacctgtggtgcaatatgtaaccttcaaaaaaagaacatacatgtactaatgtgaatgatctcccgacatattaaggggaaaaaaaaaaaaagccccacaacccactgttttcctgttgttggaatttaggtttacattctttttattacaagttgcagtgagtaattcagtcgtttcagtgtgcaaatgtatctgaagaaagctcctggaagtggaattgctgcacccggtgtttatggcatgtttccggtgttgcctagtggctggtctggcggattctcagctcctccctccctgttgtacccttccccaccacaatatggccacattttttatctttgctaatctgatagggggaaaatggtgcttaggatagatttggtgatcgtttctcaaaatgttacttttgaaattgagaattttttcatgggcttacgagcaattgcatttcttatgaactgtaataatatttagaatggaatacttttctgggaggttacgcagtttattttgtattatatgatgttgtgtatttgttttggctgtgctgggccttccttgccgctcgggctgccctctagttgcggtgcctgggcttattgcagtggcttctccggtggggcgtggcctctagggcgctccgggtttggtggttgcagcgtgtgaactcagttgtatcatctcctgggctccagagcgcatgctcaatagttgtggcgtttgggcttcgttcctttgcagcgtgtgggatcttcccaggccagagatcgaacctgtgtctcctgcattggctggcggtttctttctttgccgctgagccaccagggaagcccaaggtggtttgtttttttatttcttaaaatattagagaaattagctttttgcctattaagttgcattatttccctagtttatagaagcagtgttgctcgtaatcactttgatgtaataaactatttttggtttggcagtcatatttgttattcagagttttgaatcattcttagaaaggcgtgtcccactttgatgtgataaaagtcattctctggtttcttctaaagttttggttattcaggtgtttgtatttagaacttcttgcctacaaaggttttcagtatgaatccaacttaacttttttctttttttttgccagatttctggccgctttttatcccagatctctggctagttttccagtattatttagtgaataaatccctctggatttaaagtgcttcctttatcatctattaaattcctctgtaatctgggtctgtttctggggtttccctcttgtcccattgatctttcagcccacatacaccctgccccacactttgtaagttattttggtgttacagtatctcatagggctagtctccctctttcctcctcattttagaacctatttattattccagatgatttaaaaatcagctttctaatctatcttacccttccataccatgcccttctaaaaaaaggaaaaaaaaattctgatgttgttttctttggattatgttacctttatagattgaaagtagacacattaagagtcataaaacttcaaaaacagggtatggctttccatgtatttcttttgtgctcttcaactatgtttgaagttttcattttatcagggttttattcatttcctgttaaattgatttatatattttaacttttgttgccttaaaaaaaataattttatttatgtatttattttggccacactgggtctttgttgcttccagcttctctctagttgcagtgagcagggggctactctgtagttgcagtgtgagggcttgtcattggggtgttgtcccctgttgcagagtataggctctagaccagtgggcttgagtaattgtggcttgaggacacagtagtttcagctcccaggctctagagcacaggtttaatagttgtggcacacaggcttggctgctctgcctcatatgggatcttcctggaccaggaattgaacccatgaactgtggtactggagaagactcttgagagtctcttggactgcaaggagatccaaccagtctatcctaaaggagatcaatcctaggtgttcattggacggactgatgctgaagctgaaactccaatactttgcccatctgatgcaaagaactaactcattggaaaagaccttgatactgggaaagattgagggcagggggaaaagggtacgacagaggatgagatggttggatggcatcaccaacttaatggacatgggtttgggtaaattccgggagttggtgatggacagggaggcctggcatgctgcagttcatggggtcgccaagagtcagacacgactgagtgactgaactgaactgaactgattgccaggcagattctttaccactgagccaccaggaaagccttttttttttttttttgctttgaaaaaaaagtatttttttccaacatgttttctcattgattgttgttgtgcacgtgttgccttcttgatttctgtatgttaattttctaccccaccatcttccttcctaaaattctcttcatgttgatcagttcaattcagtcgctcattcgtgtccgtttctttgcaaccctgtggactgcagcactccaggcctccctgtccatcaccaactcccggagtatactcaaactcatgtccattgagtcggtgatgccatccaaccgtctcatcccctgtcgtccccttctcctgccttcaatcttactcagcatcagggttttttccattgagtcagttcttcgcatcaggtggccaaagtattggagtttcagcttcagcatcagtccttccaatgaatattcaggacagatttccttaggaaatcagaactggttggatctccttgcactccaagggactctcaagagtcttctccaacaccacagttcaaaaggatcaagtcttcagcactcagctttctttatagtccaactctcacgtccatacatgactactggagaaaccatagctttgactagacagacctttgttggaaaagtaatgtctctgctttttaatatgctctctaggttggtcataactttccttccaaggagtaagcgtcttttaatttcatggctgcagtcaccatctgcagtgattttggagccccgcaaaataaagtctgtcactgtttccattgtttccccatctatttcccatgaagtgatgggaccagatgccatgatcttcgttttctgaatgttgagctttaagccaactttttcactctcctctttcactttcatcaagaggctcttttagtccttcttcgttttctgccataagggtggtgtcatctgcatatctcaagttattgatatttctcccagcaatcttgattccttttgtgtttcttccagcccagcgtttctcatgatgtactctgcatataagttaaataagcagagtgataatatacagctttgacatactcctttcccaatttggaaccagtctgttgttccatgtccagttcaaactgttgcttcttaacgtgcatacagatttctcaggaggcaggtcaggtgtgtatagattttgtcttactttggtggtgttgtatttgcttaacttttttaaacagaaattctttttctgtgttttggagtagtttaatattggttttttctgtacttaaacatttgggaatgatctgtgaagctctctaggcctggtgctttgtgggtgtgggggactcgtgtgtaactttttctaatttttctaacttgtttgtttagctttcccatctcctttggagttagtttggataaattatattttcctagaaaaataaatcactttattgacttttcaaatttacttatatgcagttgaacaatgtgttcttttattattattttaattactactgtgtctttgatatttgttatttcttgattagttatttgctttgctatttttttccctgaagaaagacctataagacctattggcctcatttacaggctaatttgttcagtttttgtgactctaccatgggcttccctggtgactcagacagtaaagaatctgcctgcagtgcaggagacccgggttcagtccctgggtcaggaagatcccctagagaagggcatggctaccccctccaggattctggcctggagaatcccttggacggagggatctggtgggctacggtctatggggtcgcaaagagtcggacacaactaagcaactgacacacacacattttcttgatttgtattctctctactgtcatttcttagttgaaattaaagaatgacaagaaagtgataaaatttttagtctgtttatttcccaggtacttcaccgctttttccttcttctgccacagggattaaggaaggaaaccgttctattgatattgtgcttagactgtggcattcagcagtcagctcagattctgttcccatgagattagctgaaaatgttacaattaaatagaagcggaaccaagtgctaatgtgttgtttaattgataaagtttgtgaaattgttttgtccgatttcaattctgggacacactatatttttaagtatattttaaaaaatatactagtggatttaaatgatgaaaaattaggtttttatttcattctattgtacaaaagttaatagaactaattttaattaaaaatttaaaagttaaattagtatttcagaagagttttcatgcaaatttgcctatgagcttcttaatgttaagaacaaaatgcgttctacctcttgaattctgcttaaaatggagctgatactgtttgttttaatttagacttcagggctttggggtggggagtagtaaacaaaaccaagatacttagaatatttaagagacacagagggcttccctgtggctcacctagtaaagaatccgcctgcagtgcaggagacctaggttcagtcgctgggttgggaagatcccctggagaagggaacagctactcgttcaagtaatctggcctggaaaattctatggactgtatagcccatgaggttgcaaagagttagacatggctgagcaactttcacttcacttcacttcaagatacatagaatatcccttgctcccctaattgcacagaatgtgaaaactcagtgaatgttttttcacccaatgactacaggaaataaaaggtaaagagatttaaatgccagtagaacagatttttttttttaatactttgatctgtgggaccatttttaacttttgcatttttttttctttttctgccatcatatcaccatgtgatagctatcacgcaccgaatctgaaggtcatttcagaaaggtgtcgttttgtatttgctgtggattctcttcggttcagttcagttctgtcgctcagtcgtgtccgactcttggccaccccatggactgcagcacgccaggctgatggacagggagtccatcaccaactcccggagactacccaaactcgtgtccattgagttggtgatgccatccaaccatctcatcctctgtcgtcctcttctcctgccttcaatctttcccagtgtcagggtcttttccaatgagttaactcttcacatcaggtggccagagtattggagcttcagcttcagtccttctgatgaatattcaggactgatctcctttaggatggactggttggatctccttgcagtccaagggactctccagagtcttctccagcaccacagtcctcagctccctgctgcacacaaacccccatcgcaggtggagactgtcacgtccacggtgacaggcaggagtgaggttaatgtctgtgttctctgacttcagtgtctttggagaagtgaatgatggtctggtgcggagtccttttgctggactgtgcaccagcttgtgaagcaggatagtggggcgggggcggggacggagggagctgaagggtggccgccaggctcgctgggcagaggacatcctgctgagccactcatgcctttgccagtgtgtcgtcatcttagcgtcactcagaaagaaggtaaagaagagggtcttcgctgtgtcatccttctgagggggtctacacgctcctgtgcctggcggctctgaatctgccatcccctcaggccctgctctttgcccttttgaaaccggacctgtgttgggattctccagtgggaatcaagctgtgtccggcaggtggtggagggatgagattccacccctttggaccctccccaggccgggccttccccaccatgccatccgggcatctctgtgacaagtgcccactgagtgtctttatcttggaccacgttgatggttccagaggccgactttgctagtgaaccagtcggatgaaagaatcgtgctaacgtgtcgggtggctgtctcccctccccaggaaatgctctccggggtggtggtcatatctgggaaggactcagtccagcaccagggcctctccctgacggtggaaggaaccgtgaacctgcagctcagtgccaagagcgtgggggtgttcgaagccttctataattccgttaaggtaagaatgcctgacttgcacgtttttagttccttttccaaatgtttggggttcgtttgcatgtgctgtcttagcttcattgttgttatttgctaggaatggtggcaggcatgcttttacgactcagtaatcaatcggaaaaaacacatgcagatattttgattctgaatatatgctgttatcaaaagtctgcttgtgtttactcttatcagacagggttagggggacttgaggggggtaccttcagcccttacagagcccagagccctctgggaagttgtgcctgggccttctcacctctcaccttcctaaagcaaaactgttattataactcttattttagtccagttgcgtccaggtaaaacgctggtggaacccttctttcccgtcgcttgtggttctgtgttcttggatgtaaactttgtgctgtatgtagagtttcctttacctgaagggcagatttaactcttttaagttctgaggaggaagagttaaggggaaagaagggttcacaaagagcatgcagatttcagggcctgtccacacgtccccacagctttctttttttttcctccgtcagcacttgagagactcacttccagagttgtgggttttctcagtgtggttgtaaaccgaggctcggagtaccttccctgaggaaggtgtaccgcctgccattgaggcacgtgtgaggacagtctggctcccagggcccagactgcccgggtgcccggagcgggggccgggggccggggggttggggtggggaggagggggtctgcccctcctcaggttccttgcaagtctgattcacgctgaaggtggggatgcatgtcggaagggttgttaggggacagtcaagctgagatacttggggataagagagagaaatgtatcggtgcatttcctacttatacccaacgctgcagcgtccagtcctagaaatgaacccaacttgggcggtgccaggctgcccagagcagcaggatggtagcagctggtgggggggtggggggccggagtctcccaggagatcatttactagccacagtcatgtgacaaggagcgcggaccgatgggccgacttgcgcgtgtccttgcagcccatccaggtcatcagcagtaccatcgaaatggtgaagccaggaaaatttcccggcggcaaaacagaaattcctttcgagtttccactgcacgtgaagagtaacaaagttctgtacgagacgtaccacggcgtgttcgtcaacatccaggtgcgtgtcctgacttctcttctgcacgacagcttgctctttgtgtcattgaaagttcataaataaatgggcccaagaacttaacgctgtaggcattgctaagcccctcctgtgttccgtactgatttctcatcttgccctgcagaacatagtgtgtgtatgtaaatacgaccgttatccttgatggagaccctggagagcccacagcgtagcttctcctcaggagtcccgccgtttctctggggccccgtgcaggccacgccgacgctgtcgggggtactttattgttggaaatagataggccctcacgcctctctggtgcccgcaccgacttgtctgtttcgaacgtataaatatctctttgtttcatacccaaaggctactgctctgacataggcctgtattctttattgaagagcccgtgtaaatgagtgggggggaggtggatttatgacttcctgtccacctctgccggttcaggatgtctgtcacagtccccattgttgtctcaggcgcagtttggagtcatgactcagagcgagagaaaaagagcctttcctttattcagtggaaagaaaggtacttttgtgatatcagccttgcagccggtccctcgccggatgagacaaaagcattttgtctcacgtgtgtgcaagagggctggcagttaggaaatttttttgatttattaagttttagctgaaatttggtcctggtagagatgattcccccgcttaaaaatgcaacgctttaaaaataaaaatcctccgaacactcgtgagagtttaacccatggtttgtgtgcatgtgggttttatgaatggcttgaaagattggtcaaaaagaaacacatgtagtgtgatgtaatctcttgcagtaaatatctttctgtacaaaacttttctagtcctttcttgtcagtgcacctgtttcagcagtaaatacactgaaggcttcgggccactcataagaagggacagtaaagtgtctggactcaaaaggagccacttgcatagacacacagctggtgtagtctgaccaagtcctctgacctgctttcaagatgcagaatatttttaccatgaaagaaagtgaatgaaaactgcattttttttttttttttggcaagactgaaaatctctcagttcagttcagttcagtcgctcagtcatgtctgactctttgcaaccccatgaaccacagcacgccaggcctccctgtccatcaccaactcccggagtctacccaaacccatgaccattgtgttagtgatgccgtccagccatctcatcctctgtcatccccttctcctccttcccccaatccctcccagcatcagggtcttttccagtgagtcagctcttcacatcaggtggtcaaagtattggagtttcaccttcatcaggcctcctagtgaacccccaggactgagctcctttatgatggactggttgggtctccttgcagaaaatctctcaaacatcgcattttcaaaattattttcttttctcttgtcagaatcaccatcaacctggtttacccacacagctcttctttgatgctgtctatttactaatagaagcatacattcattagaaacaatagaataacatccaattttctgtggtcatacttcttacttgtcactttcttttcctgtgtttagcattcttgttaaaagattcatttgtttaacataaagttggaagtctcaccctttttcacatactgcctggaagggcatcagatgaaaatacaaaaacttggggtcctgtgcagctgtgtgtgagctggaaaccagttcaaatgcagaaaatacaaaaacttggggtcctgtgcagctgtgtgtgagctggaaaccagttcaaatgcagaaggagagttagcatgtggttaattctttagtaaataatcaccctgacctcggtttattttggtcattagattttaccgctttgagggtcaacctcagaatgttgtaacgtggaattctgcacctccccaaatatctcataaatttctgaaaccatagagatgtcctctcaacctcatatttgtaagagctggtcactcttttgcttatcacctagattcaacatttattagaattttgccacctttgtttcatctgtattctgaatcatttcaaagttagttacagaatcttgacacttcatcttaaaatccccagaagatagggacattctttctacataacgccagttaacgttttcacacctctcagtaggaacagaaattctccagtgtcatctaactcccagttcttaactcagattcgtcattgcttcttttgagaagcgtgcgtcttgggagacaccaggattgagacttcctgatctcgttctctttcatctgtgcgcccattcggtctctggacaggccttcttccagcctcttggttggacagtgggcaggtgccacccggagtggcagcgaccaccgtggtcctgcagggcgtggccttctcagcgccaggactcatcacactttctgtgaagattcccgggtgtgtcacttgggagagaaggtgttcttgttgagcctaaacaacagtctttctcaaatcatacgggtgcagagacacttctcatttattgtttgaattgcgttgtggtactgtaatgtggggcttccctggtggctcagaggttaaagcgtctgcctgcaacgtgggagacctgggtgcgatccctgggtccgatccctgggtcgggaagatcccctggagaaggaaatggcaagccactccggtattcttgcctggagaatcccatggacggaggagcctggtgggttgcagtccacggggtcgccaagagtcgtacacgactgagcgacttcacttcactgtaatgtaaaaatagtaaaaagagcctgacaacataaaggatttaaaatgtagccagtagtaggttgccagctcacagggcctggtttgctcacagggcctggtttcctcgtcacttcttaggcggagggctccatcatatttgctctgattctcctcagccacctttgcatccatctctcatccttatttgtagatagagcatacaggaagctgtcagtcttgccagtcatcttctgtacagccactttttccttgaaaagttgtttaaatcacagggtagtttaatttttgttctactctcgtggccctactagtggggttttatactgttaacacaaagtacagtggtaccaacacttctgctgaaatggtttattcagaagtaaatgatcgagatgcctgtcctccttgttcatggtgaaaatatcccttctaggagtctgctttaaatctgttggcttgtgtcttctttcctcattcccgtccatggtgtgtttactatcagtcagaagagatctcatcttggggcttgcctggcagtccagtggttaaggctgcacacttccagtacagggggcttgggttcctccctgctcagggagtgaaggtcccacatgtcacacagcatggtcaaagaagaaatcgagtcttatacctcctctggagccctgctcatgtctgactctccttaacgtcctgtaggtcttgccatgtagatcactcattaataattgggaaagatccagacagagtgaaaagatccagggctttgcagcagacagacccaggcttgagttaccatattgcataaagatttggagtgtgggtgtctgccgcaggcagatgtaaactcagatcccacctctgacccagatggccttcatgacctctcctcctgggggttgatgaggtctctttgtgaagtacttacgcctagttcccagcacccagaacatgccgagtaaataatcgctgaatgattaaataaatgaattcatggtgactatctatatattatgtcaaccatccttacctttgtattgtcagaattaatcaagaaagtgccgtaaaagaatttagtgaaaatcgttcggtcatgtctctttgtgagcccatggactgtagccctgccaggctcctctgtccgtgggattctccacgcaagaatactggagtgggtagccattcccttctccaggggatcttcctaactcagggatcgaacccaggtttccatgcaattcctaaaacacattggtgttttcctgtttgctctatctttctgcctgctcccactcatcaccagctgccttatattaccaattactgctttcacacttaaaaaaaacctttagtgaccaaaagctggtacccattattcacactctttcatttacaaattatagaaatctcgctcaaactggcttaacctaaaaagggacattggatcctggaactcacgattccaggggacagtctaggctgggagaggggaccccggtcagcccctagctcggcattcttggtggcagagaacattctcctggcttggccacccccgcagaaaggattcttcccctggtctagcagcggtcctggctctggtcacttccaaaccagggtgggctgggggaagccagccctcccaggcccctgaggctgaaaatgaggcagggtcgttcccattgggaaaagaatcagggagaccaggcagtccccaacaaaatactgcccatagcgtgtgggctgtacaggaaggacgattacacagatacacgcgtgtgtgtgtcacgtatgcaaatggaacagctgcatatgtagtgcagttcttgctgagctagtccggctggggaggccaggctgaaatctcggtagagaatatatgtgtgtgtttgcccctgggaaatccatggacggaggagcctggtgagctacagtccttgggatggcaaaagagtgggacacgacttagcaactaacagtagcaacatatgtatatgtgtgtgtgtgtgtgtgtgtatatatatgattgagactatacacacacacatataaaggcccttgtagacaacggtgctcttttctatttcttttctaacgtttcatctcccaggagaaccttaatacatagtaagtaccttaaatacatagttcttctttaacctggacaggtcggtcataatagtcgtaacttcttgactcatgacacatatggttccagttctacaaattatttgtaatgtttttccccagatgattaaaatactagcttgctttattaaacgtacgtgatttttgtttgtttgtttaagacagtaatgtgccatagagttttgttagcagtctctcgctgccatggacaggatggggagggacagtctcgagtcaggccgagttttcagcctggcgcccagctctgtggcaggctccccctcgcagggcacagggcctgtcttgcagaaggtacggggcgtctgccttgttggctgtgagtctcgatgccccaaggtttgcagctctgctgccatgatttctcatcttttctacaaagtcgctgctgtttcacccagagccatgacgtgccagccctgacttgtcatctcaccaggtcctcactaaagtcgcattggtgtccccatcttccagagcaggaagctgaagctcagagaggccttgttccctgtccaggctcacacaaggagcctgatgcccagctctgcctcacgggtctttccccgtgtgacaggtggggctccatgagactctgcacccgttccagggttccagctataggatggccctgggcacaggctaaggtgtctattacagaaatacttttcattttgagcgttaactcccctgggtctgtagactgatttcatatggcgcattaatgggtcggaaccttgtctgtgtgtgattctgtgatgagagcagaccctctcaagaacgtcttctctgcctttctctgcagtacaccctgcgctgtgacatgcggcggtccctgctggccaaggacttgaccaagacctgcgagttcatcgtccactccactgtaagccgcccttgggggccctgggctcggtagcaggactctcctgcagggcctggggctgcacccgcttagcagcagtgagttagctgcttgtgctccgtggctgctgcacagggccccgggactcctgggtcagagacggggagcatgattctcccggcctggccagcagcagggtagcagtgtgcatgccatcccctgggccagacccgccggcgatgcccctagcccacggggtgctgcgcctgaggggtctgtgcctcacctgaggagccccaggccagggggcccacctttgtctcagcagacggtgcgcaagcccacccttggtcctggagggaggcatcgtctcgtccttcaaggccgcttctactaacagctggcagaaatgtgcccggctgcggggtaggaaggccagggccctgcgttcttggcccacgaggcaggaacacgctggggtgctggggagggggcagggagagccttttcagacaccttctgccgggactctacaatgacagagtgtccttaagtcccctcagttggcacgtaagaactgccacctgggggggctaggtcccctccccccaggggacatgttggggctggcactcgtgcccacggccctggcgtccgtgtctcagttctccaggcctttagggcagggcctcttgaccctgttatgaaatgtccacggatgcctgagtgacgaccgagtgaagagtcggagcccttgcgcataagatcggtgaaatcactgatgcccttgtgtcaattttgtgacttttttaggattttcagttgtgtgtagtttccctctaaagtttcagtagatgtttctttcagtgctacggtttttaaaaaaatatgaaaatatttctcattttgggaagtcatttcatttagaaacagatgttttccttctgtccaatcaagggttttcaaatggaagctaaaaaaattttcatttcttcttcatgtagattactcccttaaagaaaaaaatcacatgccatttcatgtcttaagtaaaaagagcctccacctctgtgaagaataagcctaaattcagccccctgcccagggctgggtgcctggtgaccatacaggctggtggcggtggcagagccacctggggcttcctccctgctcctgggggtcacccacagttagcccccagggatcatggtctctgtgaataattgcactagaagccaaactacgccatgacccacagttgacaagttaaatattcctttatgtgctgtgaggaaaaatatattcttgaaagaatatgttcatgaaactattagtaaaaagagtagcttcaagaagactatttccgagagtaagcttttggtgagtaaagtgggaaagctggtcaggggcctttctccttcacggctcccccgccatcggggcctcagtggcctttgggccccaacctgagtaaaaggcactgggcaggccccaggaagcctggctgcgttgatggattctgtgcctctgtgatgtaggtggtggttgttaacaaatttccataacgcttgtaattcatctgttgccttacagtgtgattcttcctggtagaaggttagtagtgcagctgaatggctaacagctccagctgtggaaccagggtgcctgggtttgacttgtctgttctgctctggacttgagtgaccaggtgagccatctgtgcctcactgacctcacctgcgcagtgggtccagggccacaacggcactgcacggggcccatcacggagacacttcagtgtacaatcttattctcagagacagcttcaaataaacgtctcccagcaataccgccctgcttttaaattctggacctgcgagggaccttagaggcaaagaagcctggccccccattttccagatgcggaaacttgagtcagcaggatgaagacattggacagacacagccttgtttcctggcagaactgtgttttagaacccaggcaccctgcctcttagcaccaaggtctcccgttcttgtgctgccttgcatttcctgaaacgagggaaaacaagttggagctgtgggactctctcctgatttcagttcttccccgttttagcctcagaaggggaaatggactccgagccccgtggacttcacgatcacacctgacaccttacagaacgtcaaagaggtaacgtgctccatacacgcggcaccagggcgactttccttccttccatccttctcgttctcttggctgtgctgggatttcattgctctgtgcaggcgttctctagttgcatcccccccccgccccccaccattgcagcgcccagacttctcgctgcagtggcttcttgtggcgcgcagcctgtgcaggcttcatagttgcagcacgcaggctccgtagttgtgaggtactgactgggtttcaaagactcagtatgaaaaaagagaatttaaagcatcgtgtatgattgtaatatactgattgtatgtggaagagacagtattttcaatatactgaagaatttcgcctgtttcctttttttaaagtggctagtagaaagttttaaattacacattcacttcttcacatttgtggctcacctcgtttctgttggacagtgtgttctaaactctgaattgacttcagtaactgggaccttgccgtaggaaggcgtgctaggcagtgcctctagctcctcagacctgttcttcccaccacaccatcacacaggcgtgtagtccagcatggaagaaaagttgttttcctcagaaataaagttaatctctcattggcttttcaaaattgagtaattgggaacatttttcagttgattatctttttttttcttggtgacaggttgtccttaaacactcttgtcaacgtcctcagacgttttttaaaatgttacttatttatggctgtgctgggtcttcactgctttgcgagggctctctcaagctatagcaagtaggggctgctcttgcagtgtgcaggctcctccttgcagcggcttttcttgttgccgagcacaggctctagggtgcgggcccagtagtcctggcaccctggcttagttgctccacgacatgtggaatcctcctggaccagggatcgaacccgtgtcccctgtgttaacaggcagattcttagccaccgcaccaccggggaggtccctcagacattctcctgtcatggcgcttggtcagacagagctgtgcagacctaaggcaggcaggcaggctgctttggcgagagagccagtctgtcaggcaccttaggtctgtagataagtcgttgaatcattccgtctgttactcagactattgtaagtgctgctgtccatttctgtcagttttgtcagcgaggctcccagtgagttttgtgtaaattaccagactgtgttcggttctttgtaccagagtggctcaagtcttttcccccagcacctctcattcctgacgtgtctggttttgtctcgtttcagagggccttgctccccaaatttctcatcagaggacatctcaactcgaccaactgtgtgatcacacagccactgacgggagagctggtggtggagagctcggaggccgccatcaaaagcatcgagctgcagctggtgcgcgtggagacgtgcggtaaggcccccccgaccctctgctgccactggcccatagccgcgagctcgcctctcatctccagggtcccgcagagccagcgggacagcaggggactctcctgttgatgtaccttctctcagagtcactggctgctgcctcagcctgaatggacatgcgctgtgtcctgaccccacgatgccctctccctgctccaggctgtgcagaaggctacgcccgtgacgccacagagattcagaacattcagatcgccgacggggacgtgtgtcgggggctctccatccccatctacatggtcttcccccggctgttcacctgcccaacgctggagaccaccaacttcaaagtgggtacgtgcgcgcccttggggtgcccctgggaggggatggatctgctggtctgctgatctcgggtgcaacgtggagcacccagccctttggttgctgcacaaaattgtgtgcagagcagctgggtggcgcccaggattgaacttgcttcgtcccccaagagacagtgtgggctgctcatgtgacgacatgctctctgaaggacactaacttggccagggaccagccagccaagctcgtggggaggtcggatcagccctctgatgggctggtatttgatggggacacaagacccgtgacagcccagtgaacagtcatgttcccaagggctgtggctctggcagctgaggggaagtcggtggttttcagtgatcacacgacacatacttggaccacaagatctgagtcgtgttaagatgcacttttcaggccggctttttctcccttcaccttgtattgtggttgaatctgcagatagagaaccgcagttgtggtggaagtgccaaataaggggcagcctgtaaattccatgtgaatgtgtgactgggtgggagcctccctgaccttggttgttcaagggtcagctgcacctttgatttttaagttaaggaggaggagcttatctgtcaatttttcaacttggttttgctatgtaaacttgaagaaaggtccaaaaattattattttctgttatactatgcattaggcacctgtactatctgcaccttatttctgtcagactttacaaagcatccatgtagcatttaatgtagcgcccataattcctccatagaaataacaccctcagcccatcagccaagacattggtggtgcttttgtacttgtggctcatgttttgtttgcttgggggcttgtgcagtggccaccccttcagctgagggggccctgcaggaaggaggtggcctgtggtcattgagcactgcagcctttggtttccctggggtcaccgtctcatggccgggaggtcaggctccgttctcaagggggaatagcatgagccccgttgtcctgagttaggcacacatctgggtgtgctcctccaccccgacggtgcccacgtcgggggacttcctgggcatggccaggcctacagctgtccccagctgagcctgtggccctccgcgccgggaggaagccagcaccagtgctgccgtgggccttctgtgcctgccgggcctcctctctgtcccctccagggaggacagcaaggttgcgggaagactagggcagggtggggctgtgcagcccagagggtgttgcagcctgtgacagccaccagaaagaggaagggaacatggcagccgctgcggtacacacttctgccctggccagtgccaggcaaggcgacagccatacctggggacttcggccacaggggtccctggaggagctgtcccccagccccttccctgcacactggggagggacccgggcttgtctctcttcgggggctccctcttcagacacccccttccctgtcatccatgtgctgacccttagcacctagagagtggggagaaagattcgtctgtgtgctgaaggtagcagaggaatgtttgaacaggtgtcatggacaaataaaccaggctgcaaagggatggccgggagacagcttgccttcttttctgagtgttgtttctcgcctggcctggggtgatcccagtgggcttcgggccagtggggtccgctagtccacccaggacggtaggacaggttaaaaagaaagccaaagtgcaccgatgagcagatgggattctaggagattctgtgcagtagagacaagaggacaagagagtatttgagaatgcgggaccttaacagagtatcccagggtgagaagaccgacattctcaggcggtcccgcccgggtagccacctacaccgatttctcctggaagcttgggagggtgcgcgtgcagagccccaaggcaggggctgctgcccctctgtccagagttcagcagagcccgagtggggctggcgttcgcgcctctggggtcggtgagcgttgagcctgtctgtcctttctctcccccagagtttgaggtgaacatcgtggtgctgcttcaccctgaccacctcatcaccgagaacttcccgctgaagctctgcaggatgtagccaggagcaagggagtgcactgcgagggcggcccttggaaatgcagtcattcccccgctccccaccccaggagctgaagctggcagcacggacccgctttcttggtggttctgtatcagagagtctgaccctccttcgcttttcttcgaggcccctctcatcagagcttcccttggaaatgcgtcaggatttcttaacggtcttggccagatggcttcccagagagcaggtggtcttctgcctcctgaccagacctgctgttcatgttcagaaaataggtaacagaggctgaactttgctggagagtgaggtcagggaggaggaaacttcctgaccggaagtggtggtggccgggactccgccccgccccgccccgcccgcccccaggcggtcgctcaccacaggcggctcaggacgttggccacgcccaccgaggatggcacagggccgcgcaccggaagtgggtaatgggttttcctctcttttctcctgccgtttt

SEQ ID NO: 230 - DNA, 63323 bp, Hippotragus leucophaeus
  source 1..63323: mol_type = genomic DNA
atatatagaatgtaattttaaagtaacattaaccccttttgtcctctggttttagaaatgtttttttaactctttcataaagtgaggaaaatagggaaaaatgtcaaccatctgcaccagtaaataataactattaatattacatattttcattaatttaaaaaaaataataaaacctattggaggtgcaaggcaggagcgtgtggttggcttcacagacctcagcctcctcccagtgcacacttgaaccaaacacacaagggaaaaaaaacaggctggtggtaaccagccataacaaaaatatattctttgtattctatcacccatcaggttcatctcgcatgtttgctcgaaaccacaaacagctactgcacagttcttatgtgttccaaggaaaattgtctcttaggctaagaaagattcaaaaaaattgtttgcagtacaaaaagtcttaagagaaaataattttttttttgctcccaaaatactacaaggtgtctctagtgtatgtctagtgtactctgtgagaggtttgaattcaagtctgagttgtcggtgccgagtcccaggtccgtggcgctcgcaccatggaggtttgccatgcctggattgctagcgagctgagagagcatcgaattctggtccgggctggcaaaatgcccttgttccatggggttgccctgggcagcgaccagtccaggatgtggagaactggtctgtggggagacgtggtgtggagaaggctgaggctgcatccgtggggaagggctggagtgggggggctgggactgcggccgcggagaagggacaggctggggagatcgcacttgattggagagagacgggatctgctggccttggaggtgcggggactgagcctgactcgggagcatgtgctgctgggggctcatggggttgggctgggccggcgagcccatctgttgctgaaggagccgctgctggtaggcctgcagactggcccctgcctctgctcccagggcctgcgggagctggcccatctgtcccatgttcccttgcggcatctgctgcatgtgatgctgcattcgtggtggcggctgctgctgcggggcagggtagcccacgccctgagggggctggaactggttgtggttggccagccccgggcccatccctggccccgctccctgctgctgctgctgcaacatctgctgtcgcctcaagatgtctcggaattgcgagggcatggtgctgtgattcatgttcatctgctgagcctgcgggctcatcccgcccatgggtggtgggagctgttgctgctgcgtgggctgctggggcaggccggcccttgggacacctgcctgcatggggttcaagttctgcatggcggggctggagtggaccccctgctgacctggcatggtggggggctgcaggcccggctgcccggggagcggctgcgggttggagttggcgtacttggcagcccgctgtttgatgaacgcagccaatagctgggggttggcatgaaggatactgagcacctgttgctgctgcatgggggagctgggagacctgagagtccgcaggaggttctgtaaggcttgttgagacacagtgcctggcttgagagggctcacacctacctggcccaggcccgtctggggaggcatgttcaggggctgcccatgctgtgacaccgacatcatggctggccggggcatcccggactgcagctgctggggcgggggcagtcctccctgggcccacggaggttgctgctgcaggccggtgggccccatccctggctccaaatgcccaccaggccctctggccatggggggcgggttcatacccatgggggccatgggagtcatctgcggcatctggtgctggatcggccgctgaaagatttgcacgtgggccatctggcgttgcgtctcggctgccctctgaatctgcatggccatttccactgctgcaggtggaggtcccggaagtgggggctgagcagtctgaggcggagtcgggggggtcacttggcctgctgccttgccctgggacaccgggccagcagcttgagtcctgggcaagtagggcggcatgttgttgggaggtgtgggctgaggctgagaggggggcgggggctggggtgtctgcggggtggtgggctgctggcctgtcggcgtggttggggtggcaggggtcggggagggcaggccctgctgctgccccaccacgccagtccgctgcatgctggccatccgccggcgcagcatctgggcctgctggagccggtgttgcagctgctgctgccggagcttctgcttgatgttgaggcagaagggcacggggcacttgttctcctggcagtgcttggcgtggtagcagcacagggcgatgagctgtttgcagatggggcagccgccgttggtcttgcgcttgcagcccttggtgtgctgcaccacccgcttcatcttctggcaggacggcagcgagcagttggcgttgcggcactggcaggcgtgcaccagcgactggatgcagcgctggatgctcaggcggcgggagtctcccgggctctgcgtggcggcagcctgctggttgttgctctcgtcatcaagccccagcccgagcttctccatcttgtggtcgtggtttttagtgttgtagcaggtgatacacaagtcataatcctggggaaaacacaggcgcaggtcaacactccaagattcaagccattcaaaagtatttacatatcctgcttgggctgaaaagccccattttagagaaagcttctttagcccaaccattcaaatctgacaccaggccctacctggcctgttctggtcctcacactggccccggaggctgccctcaggccagcaccacctctgaaccgcttcttaggtacctggaatcccccagccctccccgccaagggacctacctcacacacggtgcaatgccagcgtgtctccacgtggtgcttgcactcgttgcaggtgtagacaaagcggtcctggctctgggtgtgcagctccaccagcatgcacatggtggaccactgggctcttcgcagtgacgagaactccaggtgcttgtcccttgcgagggtgagaaaggcatcccgcccatccatcaggtcacaggggatgagggggtcggggtcaacaatgggaggcagggagttggcggcagggccagcgatgagacggatcacaaagaagacctgcaacacagacagtcccctctggactctggaactgagcactgcaggcagctggccaggctctgctcccgggggccgggaggcctggcttccttctgtggccaccctgcaaggctacacaacacagcccgcgttctcctgcttcacgcatttgttctctttttcgaaactgactacaatgggcctaaaacatctacatcttgtgtcttctacctcattcagtaattcttcaaaagaagaatggtcaaacacagggccatacaggggacattctacttcaaagaggtcaacttttaagatgcaattcatggtttaacctgactctaattataaggaaataaatcagaaaaacccaaacagatagatattctacaaagcaattggcctggagtcttcacaaaatgcccatgtcatgaaagaaaataaagccaggaactgagacacggcaactcaacatggagcagaggagcagatgggaggtggtggcaggggagagatttcctgagtgtgaagtcacagcacgcttatgcagaaagagcttactgaaataaaatgtagtagaacgttaactgatgaatctagctgaaagcaacaggagggcatcttctgtagaactttcctgtaagtttggaaggaaaaaaaattggtaggggtgggaagaataaaaaagcaaaatctttttccttgctacagaaacagaaaaattttttgttgaagtttaaaaacacaacacaaccactgattcccataatcactggtataaaggctgcaagaggaagctgctatttctgtaataataaaatgtaaaagggaaccttcaagagatcaagaacttgtaactgctgtattgcccactataacctgtcagtttttttgaggctgaaaatctatgcaaactggcaataatatttgttatatatctgggcagcaatgttggcatagaacaagagtctagaaaaagaacacagtgactttcttggtggtccagtggttaacactctgcactgccactgcaggggcatgggttcggccccgggtgggggtgggggtgggggtgggggacgggacatgggactaagattgcacacgccacaaacagcacaggacaagagcatccacactgagtaaagacattcaaagccagagttaaaagctcaaggggggactgtgatactgggtttgctactgtagctcaaagcaagcactcagtgaggaggagtgtcctgaaactgtgatcacacacagggaagtactgtatctaacaagtgggagcagatcaaaccacctggtgactccctaggaaaccttcactatggccaacctccaataacagccattgtgaccgactgctgaatgtcaccctagagctaaaacaatacctaaatttaatagaatgattacattagattctaactcctaacaggagactactacccacatattcttcagatgatgtatctacaactgaagtcatacctattacaacatactctaagggcctttcctaatcgctgttatgacagagttccttacctaaaatcaaaccatcagttccctctccacattaatagcctcttcctgtaagaacctgatgtctgaacatggagataaacagatgtttaaacaaaccaacatggcccttcaaaacgcctcatcttactgacaaaaatgtcgaaggggaaaaaaacccaacgtactcagttatattcccaaacaacaaataaccaatataaataattaaataattccaagttttaactttgctgtgaaggcattcatgaatgcatatatcaaaatttaacttttcttcaatcctctccatttgccaattccctttgtaaggcaaaacattcattagttttgccaaagttccattagaaacttgaatggccaagtagagttctaaggggctttggtataaagcaaaagcacaaagatacccaaaagatatccaacaagcccatcttctgaacaatggacagaaacacaaacataaaacggttacaaacaatagggtcagacaaactgcttacacttctcccaacaccatatagctttgtaacagctacagatctaagtaagacaccttaccatttcgtgttctcaccaccctctttttgctttcttctccctcaaatgattttctttttttttcctaagggaaagtgaagtcgctcagtcgtgtccgactctttgcgaccccatggactgtagtctaccgggctcctccgtccatgggattttctgggcaaaggtactggagtgggttgccatttccttctccagtatgattttcttccttctgagtttcaaacgatctggtgctcacatcataaataccaactatggtgggcagttctggaggaccctggccttggttttcctactctgggggctgttctcttacctctttgtgcttctccatggtggcatacaacttctgtgagaggtcgttagatacgttgggcatgcctggcttcttcttattgccccgactcaggctgctcttgtttttgctagttttcttgttgtttttctttttagcgtttttgctgtctccctttgtcacctgcaggttagcatgagagaacaagaaataaatgttagtaactctttaagagactgtttacaagtttagaacagttatttgttaataactgtgaagaacaagtttctaatggagcaatagctcataaccttctaacagctgctctctcttcactgctcctctttctttttaaagctgttgtttacagtaaactaaggtttactaatgtttttgcattaattttctcccactgaaaaatctctctgctgatatctcttcattagacaacagcagccttagctctttggccagcggaagctgcggaccaggagaccctcaggtggagccaggccaaaccaaatctgaggatggagaggaatgagcagcaggtagtgaagtgtgcatgggagtagggagccaaaggccctggctctagttccttcgactcactttctaaaatttcatggactattaaaaaaaaaaaaaaaaaccttgaaaaacattcaatcaagaagtctaaactgcaggctgtaaagaactcttagactaagggcaacttcagtagttcagactcagcaagggcaaccgacacatactgcagggaaataaatgacaaggaaaccttgtcatctgacctgctataaggcagcttctgtaggggggactggtaaactctggcccagatttgttttttgtatggctaagaatgatggtttttacacttaaacagttgtttaaagaagaaaaaaagaatgtgctggagacaatatatggcctgcaaggcctgaaacattcataattcagacttttgcagaaacagtttatcagtgtcatgttctagacaggtagtgttctgttctccagggtttccattactagaaatccaggattccatttaaaaatgaggtctggtgcaaaaagggcttaaaatctctaaactagaatcatagtaacttatctacaccaatattccgcgcctgcccaacttagagagctagagcttcagggcccagtggaagcctcagctcacgtctgggtcatatgagcggaggcagaggcaggaaagggaaacagaaagcgctcacatctgtgctctcgttgctggtgttctcctcccgcttccgctcctcctcctcctgctccagttccttaatgctctcttccaggacattgggccagaaatctccctcaaagtaaggcaattccttcgcgcttgtcaatcgatcttcagtagcttgttttaaaatatcctgtgaaaatatccaagaacaaatagcaatgtctatttttttgggaaaaaaaaaaaaggcgtttattatatagcagcagaatcacagctaacggacacaagaaacgcaaagaaccagatctgtcttctggaagacagcagggattttatgcccaagcctggtgcctggggagacagcgtcaccaacagggaaaggtctggtctgaagtatttctggcttcctctttcctctacccgtgaggatggggagattatctgcctttatgtaaccaagtgacaaatgcctctgtcaggaacaaaggcagaggcagcagcattcacacccatccctccaacacttctgagacagaatgcagtgtgatgggaggcacgctggtcttgcaaaaatcctagaaatactggcagtttctactgagaaatatgttcagaaaaatcccagttacagatactggaaaccatatagctaagaacgattttccaggctgcttattaggacaataccggttcatgtttccctccccatgagtaaaaacaggtgagacatttaatagttcaagtttcttattatgagacaccctacagtcacaaatgattgtcaaatgttttgccaaatctacttcatcttaaattacatggaagagtgagaagaaacacaagatttttgttaagatagtaaaacaagccaaatacagagcagcaggcctagtcaagccacggtgctgtcatcccccttcctgaccttataatcatggacgattcgttcggacacagctttgtcaagcatctttttgtaccactcctgcagtcgcttgggcttgggtatcttctggtcaggggggtggcaatggaagatgtagtcatctccttcacttggcggacacgcccaaatatgccctgttgtgtatctaacaacacagacagaaggaacactgaagagaaagatcatccattctagaaagaatgctccactttaaaccacaaagaggaatcagtacagaaactaacaattcccccagataacatgaagtgtgtgatctatgacagaactaggcataaccctggatcaaaaaaatcctcaatttgtatttaaagaccaaacaaaagtgacaatgcaaagggaagtcaatccatgtcaacaagagagtttaatgaaatgcaaactatcaggaggaataacctgcaatgcggtgaggtgctaaacattctcaagcacatatataccttgaaggtaaggaacccgtacgaaggagttttgtatcttcagaccttggtgtgattttggttttgatactcagaggtgtgacaggaccaagtgcagtttaaagttctggttcttcaaatcaaactgtatcaaacagcttaactgaacaaaataaagtaatttgggatgggtgcaactagcatcacaatatccatttctttcccatggcaaagccaacaatttcaaagggtctctaaattatagttctgccagatgaaaaccaaagtggaggagaaaaaaccaaaaagttacatatttgcacgtactgtatctcaccaatacaccacagtggtgatcagtttaaaactatcagtttttaaaactagcatttgtttttatgcttaccctaatttcttgacatactccaaatatccaattaggatttcatgatagactgcagtcctcaagcatttaggacggaagaagtgaacactatcgaggtatgatatgtatactctcctgtatcaaacgaggagaaagaagccaggtcaagttgcataatgagtttctaatgatgtggctaaagacatctctcttctctgtgccctttgcttaccttgtcatatttaatgcttatcacacaatattacatttatttaggtaaatgactagatcatgagctcatcaagggagttttgtgggtctgtggctctattactatctcagcacctagcagggcctgagacacagcataattagtcactactgagcaatccaaataccttctggcagactcttattctggcctttatactacgtggaaaattctacaccgtattctacttcacttgtgtgacattctttcacatctcaagaaggtactcaacacaacctagatttaagtacattttctgaaaagtcatattttaggctgccgttcatatctctttccctgttgttatgaacatgaaagagcagtattttctatttttttgtttcacttctacactacacacttgagaacttgcatttccaaaacaagcacatcattttcttatccactatgcttgttcacctgatgtaatttcaaacttccacacaaattagaaagtagccacagtaaagtcctacctctggttgggcggagggcagtcagagccatactcttgaacgtgcataccaaagaagcacaagtcaacaccatcgatttcttcgaaggcaaagagggctttggttcgatatggaaaggattctgccatctctccactatctacaaatctatacaattcatagtggagggaagaagtacaacatttcattcagattagaatcatcaacagtaactatgtgtgagcaattatggatccacagagaagaaagggggaaatcactacataccttgctttcatgcctggtttgacttccacagttttgtcagaagcatgaactactcgaacagtgacctctcctgactcagggtgattttgtcgcctcagaaactcattcacacgattctccagaaatgtcccaagcctggtagatggcagtcctaggatttacaagtgacaagttcaggagtagccaaggtgcacatttattactaccagtcaaattccaataccgtatctcacttctgctttttcaacactagcaagattatcactgactcaatggccatcaatgtgagcagactctggagataatagtggagtacaggggagcctggcatgctgcagtccaaggggtcgcaaaaagatggactcaactgagcgactaaacaacttcacagaatagcaaaaaactgcacaggcatctatctccagaactaaaactactgccgcccccccccccatctgaaaagatcacatagggctaaatgcagcccctccacaaaactgagggaatcactcacgggatggcaatgctggcctctgtcaggaaatgtgttggaataagaaaaatacatctgcgcctttttacacattattaggtgtaagtaacttcacaccaaaaaggatcctacagttcaacttcaagtacatcatggaaaaattatttgttgtttagtttggttaaatattttaaataatgttgaaacaaaataattcattctggatgttaatttttaacgatgttttaaaagcaaagttttcccataatttacctgtaagaaaggaacttacttttagcagaaaacttattttcttttctagttcgtgcagtcttctttaaacaaccatcacagacaaatctaaaatgtaaaccaagactttaacaacttagaggagcatttcaaataacgcactctacagaatttatcttatatatgcgtaaagttgaaaataaacaaaaaaacaacctgggagaaatacaaccaatatacagagctttcagaaaacattaagagaaaaaaataaataggtaaaagatacaaagagcatataaactagcttacatgtgcaaagatggtgaagatcacagattaaagcagaaattttattttttagtcaatcattagcaaaagtgtatctgttaccagtgggaatataaaaagggacattttgaaagcagcatgaatagattttatatgtacattctctctgttcctgaaattacaaaaggatgtgtgcataagtagaattttgagaaaaactggacaccacgtaagtactcatcaaccagctggctgaccttcagttgcaaggatcactgcaagtctcatgatccttgcctactctgtaattaaggagagaaacctatctaaagacaagcttatctacgacaattttccttagtgtttttttttttttttctggaaattttgttatttagcctccttttcccccatgaactctaaactagcatcaggttagtccaggaaaaaagcagaggagagagtagagctctcatcttgatgagagtcacttaatgcacagacatcccctccccaacctttcccttgaacagagctgggagcagcctcattcctggagagagagaggtagccgtggcagtaaacacttagcagtgtcacaatggacaaaaatccacttatttccgtgaagggcactgatgatatgcagcctgggtagatatgtggagaatactcaagaaacaaaacatgaggcccaagcgtatctagttcactgaagtttgtatctcatcattttcacgcatctctgcctttcagtggggaacacccatgttacctgttatccaactgcccaaaagactttaaataattcaagtctaaccagggccaccattcagtatacaatctcactgtaatgttttctcagaggcagaaacaaagtcgtcattttggtgttctccattattgatatcatctagtctgtctactgcgatattagcaacactcaacatctgtcaagtttagttgacacaactaacactttcagggctttcctgtggctcggtcagtaaagagtctgcctgcaatgtgggagagctgtgtgctatccctgggttgggaagatattctggagaaggaaatggcaacccactccagtatccttgcctggaaaatcccatggacacaggagcctagggggctacagtccatggggtcacagagagttggacatgaccgagtgacataacagttgtgtctaacatttcctttctagtttctaggtgctacagatttcctgttacctctattgataaatcctctatatttacttttgatgcacaatgaccaccaaagaatttagaaacagtgaaccagcagagagaagtgtctctacatggactaacacgatgtagtaagagaaggcctgttctggattccaggttgattactgttccaaaactgaattttaatgaccttttcccaatccagagaataattctaagaggcaataattttgacaataaaatataatcattgcaaagatgacaaaaacttgctaaagttcgcaacaaagtctggggaaaatactgatgcctcaccccgatggccagatgatctcatgatgaaggacacagatctgatgcatctttctcccacactctgtacactcaacaaacctgcaaaggcaaaacgtcgagttaaatccaaaacttgaaccaaatcaaaagtgccggtatttctcgttttctgacaattcaaaagatggccaagatcatgcccaaagaattgaagtaatagtgtttaaaagctctttaggtagagtgaatctcaaacgcagttaaattcagtcattttatggagtaaaaagtgatagaaaagatgactgctgtttaaacctccaaatctgacaccatcctgtccattccaggaatgtctagtaccagtacatttctgtacctctgaaaggtgtcactataaaggaggcgattatgaaacggttggaaaacacacaggacaaggctggaataacggcactgagcagaggcagcctggcgcttcacatgagcctatgaagcaccaaaacactagggagggttagtgaaatgcaaatgtaaaccacagcctcgatttttaacatttctaccttgtctgctagatgtaggttacagattcagcccaagaataatagcataagcacactggctgcacaaaccaaaagaatgaaaggaagacagaaaatgaaagtgtactactcaaggggaactacttacagttcaggatccagagtgtcattttttctctttgaaaattgttctttatttattgtactaaggaaagaagaggatacaataagaaaaagcaacacaggaagattagcaagttgactattgttctaataaccaaatgataaaaacccccaccctgtaagattatttaaatctaagactatatcaaggatacagctggtacattcttagctcccacaaaacgcacgtttacatgcctatgttttgggaaatgactttatagtaactctgttcccactgacaggagaacccagtaagatctaaaagcatgaatttgtacttttttcttttccttttaaaatcttgcttactactcttagtgttagtatttatacctttgaatagtttactgtttctagacagctcagtctagcagtatgaaagacagtgtgtacagagggagctaaaccactattgaaaaaaaaaaaaagcattttttaggacagtccagtcaagcaactttttatattaataaaaaattccagcactaagaatacatagttcaggttactgacaggattagttaaaaaaaaagggggggggggttcattaaaaaattttcacatggcctcctatcctgaaatctagcctactactctgctcatagtctcacaaacacaggaggccacctacaacaaacttttgactactgtgattcttcctcataaaaatgaagcgatttccccattgaaactgtcttctcctagttacagactccagatccatcactacgtgccctaaggtattgctatccaaagtgtgtttggaagactatcagcctggatggacctgggaacttgtcagtaacgcacactctcaggctcactgccaactgtagaactggaagaggggttcctacacacttcaaagtcagagagctgctgtcctaaggcacagaacttgtggtaagggtgcctcccttttttgcatcagggaaaccgacctagacctgacttccctggttagccaagggttagaaaatctcaaggctcagaaaatctcaaggctcaaggggacctaaaccagtaccagaccccaccattttatatgtcaatggtgactaaaggaaaagtacaacttcaaaatccaatttgaagacaccaagtttttctcagaagccctgtttttactagtaacataacaattctgaattgctatggaaaatgttctgagttgtttgtttattgtaggttaaatcggaagagaagctgaagaatatttaaaggataccaaatagttctttcttcctaaatgagttaaaatttgacagtttgaatcttatagagattagaggcagttcaggcaatgtttaaaaaattttcctggcatttaccgaagcacaagagcttgtggattgcaaaagtccaaccaagtctctttataataagtcattctcacaacctcctaaatccctaatgatattatgatacacatgattctaaggattttggtattgttaacttttatgagaaggctgtatggtggttatttgttcaattctcctcaaactcaaaacaattaatgatgaagttaccttgcactccacactttcactttttgggagaagctatttccttatagaaggaatctatgaccatctagtactgttgtacccccctaaatcagtaccaagagaacttctgcaatgatcaaaatgttctctatctatgctgaccaaaatggcagccacgagccacaaatgtctactgagcaactgaaattagaaattttaaatcttattttaatttgcatttaaatagctacctgtggctataccatcctggacaacaaaatctaagaccacttaaaagcctgagcacgatcatctgacaacaaactgaaaagacataacagttacttacgtttgaggttgggaagggtcatcccccaaagaaacgctctccccttggatttcattgaaacacttctcacagaaatgatacctgtcggcaagaaggccatactggggtgaactgttccgttcacacaacacagcccaagccaagcaacgaagccaccaatcacagcaggccaaggagggggacgggagcagagagcaggtcatcaacggcgacaaggacattcaatgatgcagatttatgggcaccacagtttgggttttggtttttgcaatcaaagccaagtgcagacaacgacaagcatgagggaggaaaaaaaaaacacaaaacaaacgaagaaatgagggattgcagggcaacaaaaaacataaaagcaagacaagacaacacaaagcagaaagccaaggcaaagcacagattagcattaaatatctcaatgggatcacaagtagcaaatgattacagcaaataaacaagtctcacacagacctataccctttcatttgagtaattaatgctacttgatgcaaataatcaaagataggataatcaaaaatccacaatgaacatagtactaggaaataatcatctagaaacaattttggtctgaaaaaaaacaaagaacaccaatttctctttgatcccaaggaaaccacaatgtacaataaaaagtctgcacaaaccattaaatactgattgtagccacctagtttgagaagtaaatgaaaggcagtggtatgtgcagacacgcgattacatattccttggtacaaagactgcaagcgctgtagactggtgtttaaaatccaaaaatggtacataaatgccaagattatagcatgagactatagcatgccagctgtcacgtgctttttttgaacataaggtgctaataacaacttgagacccatctttccctaggttttcatgagtaaaaaactgtgggttcttacaactacaaagcattaggagaattcacctaactttttgtaaataaaacaaaaagtttaagtgactttttcaaagctagaaatacagctgtaatgcacaagttcagcaaaaagccaccactatggggctgctttatcaaagtactgactgtccagccatgctcttacactgtcttagagccccaagtcagcaccctatgccaggcacactgctgactgatttcacaaaataaagagacaaatcacgattaatgaatgcattctgtgtgatcacggtccttactttagtaggagaaaagaaggcagaagtgtctgacctactaaaagcataaccatccactgtcacgtgcatcctgtaaggaacagtccagtactgagctgtttttggaggtgttccttttgatgtacttaatagagaaaaaagcaagtaccctgggatcctctgattttatatgctccaagaaaaactgaggaatccattgcacacaaaaagggaattatttcctaaaagatacagctggctaacaaatttatggttaaaagttttctgggtagttttgggaatttcatggaaagatagaccaattagtttgacaattttctgttttgccagaggctgtggtaaaagaatgtggggcctgggacataatcccatgtatgctaccaactcataaagttgcttgacttcttcatgccttgggttcctgccttataaaaatacgggcccagacaattgacccaaggctcctttctactagaaaatcatgcaattctcaaaggcagaacgctaagaccaggacttgtgctgtacagctgttttcaagcaagccacacacgaaccatgactgtatgtgtgctggtccatccgcatgcactccctggacacgcggacactgtgaccttggtccacacaggtcgagcttacctgttctgataactgtagtaagtggcatcacgagggattgtgcataactgtttgccatagcaacagagtgtctgtggagagaactccaactgcaagagaaaccattcgatgaatatggtttgaagggcaagctaaaatatttacactggcaaatcagaaagagaacttaagccttagtcctcattatgtctctcacgatgggcaatttcagtttccaagacagttcactgaactaaaactactctagtttactgctgtattattccaccactctgaggtaagcttaatagttgttacttctccaccagctgccaaagaactgaagagggcaggagcagcccagtgtgaattggcacgcacaggaaaactagcacatgccaggcacagtgctccgcaggcaaatatgaccaagttcctaactcaagatgaacttaaaacctgatgatccaaggattcaaaaactggtcaagttttcattgtaattcttatctgtgcaaaaatttcctacctttctgccacaacagtatccaaggctttgcatgacagggtcaatttcttgttcgaagacctcagacagctttgagcagtatttgtacacccgtgatgttttccgattatataaccaagcattgttgaacatgagccaaatgtcatccacatactgccagggctcctgatactgtccagtgtctaacttcctcttgatggtagaaagatccatagggctcttcacaatatcaaagtaatcctagaaggacaagtgacatcaaacaacattaccaaaaatctcagtatattcaaggtccacagcataaccatttaaaattttctaggtaacgctgaatctttgatgtgtctgaatgtccaaagaaatgactgatgcctattacatctttattattaaaatatacgtttgtctatctggctgcatcgggtcttagctgtggcatgcgggagctatccttgcagcacataggctcccgagctgtatcgtgtgggctccggagcactcaggcctggttgcgccacagcatgtgggattttagttcccaaccagggactgaacccaaatccgctgcactcaaggttgattaagtcactggaccaccaggcaagtcccccaacacttccttaaatcatcagtctatagacatattaagcagacaggggcagagagaataacaactattctcgactttcttgttgttcagctgctcggttgtatctgactctttgcgaccccatggactgcagcacgccaggctcttctgtccttcactatctcctggagtttgctcaaactcacatccattgagtcagtgatgctatctaaccgtcccagcttcagttgccctgttctccttttgccttcaatcctagactttctagtagcaagctaatggtctataggagcgattccagacactttattatagtatgtgtgtgattaacttaaagaccaagaagtcaaagacccttagcattttagtactagatggggcctgcagatgaaactaagatcatctataaaaacagaggggaaaaaaccaaaagattccaacagatctttacccctcgaagcactccaatgccttatccaacaccacttaaaatcctcaaatgaaacttgccagtagtctggtgtataaaggcaactttaaaagcagatgaagctaatttgggtctatcttttctatcatgaaactactgctgctcaactgataaaaataaagcatatgagccagcaatcccatttttagatatatacccaagagaaataaaaagacacacacacaaatttgtacgtaaacatttaaaggcatgctatcttcaacagccaaaaagtaatatccatacaaataatggtgggtcataagaaagaatgaagtactgattcatgctacaatatggacaaattttgaaaacattacgttaaatgaaaagaaccgtgtcacaaagaaccacatactacaagactccatttgatgaaacgtccagaacagactgaaggcaggccaacagctggttgggagtaggggggctgtgggcagaaatggaagtgactgcttatggacacagtttcttttttgggatgatgaaaaatgatctaagactgactgtgctgacagtcgcacaattctgttaatacaaaaaaacattaaaactgtacacttagattggtggtttgtataatatgtgaattctatctttaaaaagctgtcaacaaattgtaagagaaataaaaagtaccacccacatacttacagggattcctagaagctgagggtccacaggctgacgaaagggaagggattccggatcctgtcggtaaagtgcctccaatgttggcatcagtgcctgtcgtaactcttcaggtttgaaaactgaagaagagtatattagaaattagttaccaattaagagaaagagaggaaaaagttcaagttgaaactatataatatatacctcaagacccagaaaacactaaattccttacgtcgtccccgtgaaagatcactacgggtgtttctattttctggttcagacagatcctttaaaacaccctgtctagtcatttttaaatacccttcatgattagttaaatttcttagtcagaaactcacttcgtcttgaccaagtagcaagagaatcctaagtgctccaaaaatttagaaaaagactttttgtcagcatattccaaatgatacgacgggcaggggatgctgtcaagcaagaagagaaagcagtcccctcttcacaatatcagcggataacaagtcagaaattagacctggtattgtcttatcaccaaaggaaccagaaccactgaaggccaagagtccttcgttaaaatgtttgatgttttagagcttcagcagtagacatatttactgtttcaatggcaaatgttagttttaattctaaaaaaaaaaaacacccctaaattgttatcatcagaacgatgtactcagttatcaaattatgctcaaatgtgttctcagtatgtttcccaaaagtcaggaagatttgctggtgtgtgccaaatggaattacgctccgtttaagaagctggctattcagggttcatcactctgagcagaggcttatttcttctatttacaaattaatttcatcttcaagatggtatatctgtcagtaccttgagtattttttcaccgcatggtgagggctgccatgaaaaattcaaacaaatagataggagaagcttgtctcttatattaatattttgctgtgttcaaacagaatttgagcaaatttgtgagattagctattttaagtataaattcttaatagtaagactgggtttgttgcagcctacatcagaatcacatctccatatataaaacttcatttttacttatttttcagcaggatcttagttccccagcaagggattgaaccccacctcttctgcagtagaagcatggagtcctgacagtggaccaccaagaagtcccgacaaccttatttttaaataactttttagccccatcattttaaggtgcattgtcctcatggaacactttcataggtatcatctcaggagctagcagagcccctctaaagtaagtcctactacctgtgacactgaaggggtcactagagccgtaagaagttctagtcctaaactagctagtgaattaacttccgtgggacctgttaaacactctctgcttaagcatgcttgcttgcctcattaccattcagtagcatggttcagcctgcctggactaagtgagctgggttaagttactggaccttgctgagcctcagttttcctgcctgtgaaacaggggtcagggacctcacggaggggctgtgaggttctcagatgagacaaggcagcttgtgatacagtgcctggtgcacagcagttaacaaagaaaacaaagaatattattactgctgttatttcctgcattttgatccagagtattatttaataatttttgtcctctgaaagaattctgagaagttgtttgccacccagtaactgctggaaacaaatacacttaaaggaaagaaaactccttctccaacattagtaataatgaagaccaggcccagggcaccaggcttaatgaaatcacatgaaagttcaattccaaggcccaagaagcccaatctcacgctactgaagtctttagttttccctctgcctccacgaacccagagcctaagaaacttactcttcttctttgactgtcccggggctggagatgactgggtcgctgaagtacttggctggtcttcttcctcttttgtctcagtttttaattcagtgcctcgctcttcgctttctgtaggttctactttacagtcttctgctttaggctagaaggcatggtaggaatttttggcattccaaagacatgtaactgagtagcagtaccatcattatcttatttactctcccctgtggatggagctcaagaccctttctcaaatggaaatcagtaaaatgagacctaatcatcagagtcctttcctgtaacatgttcctaacccaaaaaagcagtaactgccctcctctcacctctggaatatcctccggctgagtatctgctggttctggtgcctccacttccattttaggctccatttttacttcctgtgaaggctgcttctcaggaatggtctgagaattcacttccgtgctactagtagatggagggtttgatacctgcccttcaatgctgacagctggctgggaaagctgggtagaaaagggcggggcagagaaaaaaaaaaaaagtccgtctattacaaaaccagaatttaggctatatgacaagatggcagaataaccacctatttctaagctagtgtcattacacccatttatggtgtcttggggctagtaaaaaactcgcctgcaacgcaggagatgcaggaaacatattcgatccctgggtcgggaagatgccctagaggaggagcgcacagcaacccaccccagtattcttgcctggagagtccccgtggacagggcagcctggtgggctagtccatagggtcgcagagtcagacacggctgcagtgatctggcacgcatgtgcacacatggtgctttcacttactctgcctagttggccccctgaagtaaatcttgcttaagaaaaggagactgaggactaacgaatatcggccggctggttgtacacacaagagtcagcaactgtttctccagtaacattctaggacagcgcctgggagggaggcttcagaaagggctgcctcagaggagctcatgtttatagaaaaatggaaagaaaataagaaggactgatgggcaatcttttagttttaacttctccttaggaaaagtttcatatgtacaagttcggagaatacaataaattcccacaatgagcagctgttttgagtcatcacattctaatggataactaacaacctctatttttcctaagtcttgcagtaacatacctcttaatgggaagtcagtattttcagaatctatcctatgtagaatacagatgcctttttgcatcctgccttttcttacatatcagaggctaagatgaactagtcacacatgaacaatgtattaagaagtagcgatgactcccagcacttctcggtttgccaataggacagagaactatcagcgatcatgtagaaagtttcaacagtggcacggagagttctgttaataaggatgtaactggtggacatctggatctctgctacacaggtaacacatctttcgcaaggagtgtttcaggcccttatgaaataccttctcatgaattttctaactttggctagtaccatagacattcataaatcaatgattttgttcatttgctcttgagcacagcagttcaggctgtttgaaaagattaagtatctgtaaaattcacgtgtagtactaaacgtctggtcgctcttctccccttacatgctttcaagcctctgaatacaacgtgaccgcggtcaacataagatctaaagaaaatctttgaggtccttctatgtgaggtgtgacagcaaaagtccgtaaacataagaggcgacagtctgaggaggcaacagtgagagaagaatggcagagaacagacatggcacagggaagttcccccgaggtccagtgatagggactcggtgctttcattgccatggggccagggtggatgcctgctcagggaactaaggtcctgcaagctcaccacccccacccacctcccaccaaaaaaaaaaaaaaaaaaaaagaaaagaaaagaaaaaaagaaactgcactgaagtagtgtcaaactacagtacggctgacatggttctgctgaaagcccagactctgcttactggagttgccggctgcggaggcagcaggggtgcggtcggggtgggcacagaggctgctgcgctttgctgggacaggggctgctgctgcgcctggtcgactgagggagcagcaggaagcgaaggctgcacttggggaggaagttgcgttggcggcggcgtaggcgtctgtcttggaggcggatggagaacctgggactgtgggccaggtggcatggctggaggcgtaggaacaggggctgggattgctgttgctggtggctgctgagcccctatgctagggggagtgtggtgaggggtgggggtgcgactaggtacgggtgagggtgagttctgatgcagagctggttgagggagagggggacagtgaatgtggctcccttgagacccgggaggcattataggagagttcacaggacaggaagaactggacatctgtgcctgttaaaaggaaaaacataacaagatgcaattcagaacagaatcaaagaagtatttacataggcaggctacatacatttaacaggaatcaacaatgaatgcctccatttcaaaatatgtcaaaaaccctattactgggggcctgtctttgggaaatccaaccagtacagtactcagttaagtggatgtctcggggctgtgggggcacgggacaggtgaacctgttgttttctagccgtccaacgctctcttcagccaaagttctctcttctgcttcatagcgctcagtaagataccatgtttgaagagttcgctgttttaaaaactggctaaaatggttttctttaaaatctaatctctttcttacttgggcttccctggcagctcagttggtaaagaatccacctgcaatccaggagacccagggtcagtccctgggtgggaaagatcccctggataaggtgatggcaacccactccagtattcttgcctggaaaatcccagacagagaaacctggtgggatacagtccatggggtcacaaagaattggacacaactgagcaaataaaccacaatcacttttttcttacttattaacaaggaataccactgctgtatcacagagtcatcacttcatgttcagaatactatgtccataactattttaattaaaagcttaattctgatgcccttctctgtaaaaacctacatcaagagaagctttaagaattgcacaaatttagaacaaccatctgtgagacatacttgagacactggtgcttgaccgccagacggagccaaaggcatatttgttacattcattccctgtgttgagaattgagtctgaggaagaaactggctctggctggaaggctgctgcatgcgaggcccgtagcccataggctgtacacacacacacaaaacaaaacaaaacacagagcaccaagttgcttcattttagttattctgctaaggctggaatcatcaattaattgctctggccctgctatgggagggtggagaagaaaaagaagaaagtggcttgagatcagcagacactcatgccaaggtaacagagaacagcctcactacttaacctaaagcccactcactctacagaagttacacacacacgtctagaccgaggtacagaggtaattgtctttatacactgcccgttttataagtgagaagagcaaatcagtttcatgaggtttttgcttatgtaggtattattaaagcacaagctgtaagactccatagtgagtaattatggataccaaaggcccaaaacttcataatcaaagaaaggcgtttgtctcatagattaaaatgaaaaataaaacccctcattaaacacagcagctcagaggcgagacaactccaaaaaggcccaatgactgacagtactaactctgggaggtagggtaagggctgtgggccaacatggagaggtggatgacaggtttagaatctgcataaggagcaatgagatgctcagagtccctcttctccacttgagaaccagacaactgcccctccaccactcttgacagtttcctccctgggctctatgtttggggaagataggcattacggaagagagaggactctggcaaagtgtgcagactactcaacactgagtgagactctaggcagtgctggctgggtgctgttacaagctttctagtactatgactagatatgaacagtatttggaagcaaatctttcttttagtgtttattttatataaattataatccagagagttcttaactgtacaggatcctatatactttagacacatgcttttcccaagtaaagccgtaaacagctttcatgctctcatataagttctgaaattaccacttaagaagcattccaatttacagatgtaccataatttaaccataatgaatcccttaatgtacattcaggctatggccattttctaaaacacattatataatataccacccttaatatgaattttcttcaaattatatcctttcagtatctcaggaattatttctataagataaatttctaaaaacaacaaatataggtaaaaagaggtaagtgaaaattaaggactttagtattcactgcctaattgtggtatatggtttagttttaatcatttaatcaggtctgtgttaagggctaaatacaacaaaattctatgcaaaacaaaaaaacccaaaaacaacagcattaagaactaattgcatacagttagctgtttaagcaagtgttagaatttgttgtctcagagaaaaggaactttaaaaaggtcaagtaaaggccaaaaagatgacccagaagtcagacttaccgggttaagtgttccagtttgagctaactgtacatggtgctgaagaggagaggtttgccggggtccgatagggggctgaggcatattcatctggccaaattgattcaaacctgtaatcagtacaaaatactaaatctgaacaccatgtgactggagaataagagttctttacaattctatgtcattttaccaggacaaataaaggaacctgcttccaactgtgaaagaatctctgtttcattccccaacagctacagaaaggcattgttaattaatgcatggtctcaaccaaatttggatggaataaatctcatcgtggctagttgtttttaaatgaatgcttgatcgtttgtatcttttgctcctagacctgccagccaacctgctcttcacccttcctccctccctgggctcctaatctaaaaggctttctgatttctcaagcagacaatcgtaatacctgctgctgagtggcagcaggaatcaaggtgacaattttaagcttgtaatacactaggaattctgttaaaaaacaaaaaccttaccaggttgtggagttacccgaggcatcatctggtttggcacattgccacggatcatagatggatcagggagagggccatctagagcagaacagagaaacggttagaaacgcacctttcagccagctattcccgtttaaataaaagtagtaacttacagaattcagtctatcaaaagaataaaggtttgaactagagaggaatctgaagaaaatgcttttttgcaatacaagaaaatatctcgaaatggtcttagtccatttctttatgaatcagggtgcttttggtgtgacaggaaataaggtaagatcttatattgaaaaagactaatatcggagaagccaatggcaccccactccagtattcttgcctggagaatcctagggacaggggagcctggtgggctgccatctatggggtcgcacagagttggacacaactgaaacgacttagcaggagcacactagaaccattgtttgtattttaaaataaagactacaatttaatacctgacaaactttaaacttagctcaaatttctaaagaagtcaagtaaatggtaccacactcgaatatctcaaacttagccacttgtctctatgtcgtagttactgctctaattcaaactatcaccactgaagcagtgtcctcaactctagtcttgactttgtttctgaacaattgttttacctatctactaaaaaaaaaaaaaaaaaaacacacccaaacccacacacctgcaattttcccttgctagtggggtctccgtgcatgttgttctctctgccagaaatgctgttctcaattcttttcaccatcatggtccaatgagaaaatgtatccagcacaccacagttaacacatgaggctgctgaaagctctccacctgactacttcaagacctgtggggtgtgaatttctcagcccattcaccattcaccaatggcctaagagttggtacctgctggctcagttggcactactttataggcagccagcttttcctgactcaaaaaacacaggttttccccatcatagccgttcacacatcatttaaacagttcttagcctatgaacatactgggtcaagaaagtgtgacaaggtaagtaatctgatactgtttaggatgtatcgaagccagtgaggtgcttgcctgctgagtctacatcaattggctgcctaccacatgcaggtcagtaaaaacccatgggctatcagttcctagatgtcactatgtggcactaaaaatgatgccatattgttaagacaagtagcaagtctagaaatcttcaatatactgtttaatgtttttactagagaacgaaccaagttctttgaaaaggcaatagtcatttgaaagctctagaatagtaacataagctaatgcaaattagtgaatttggttagaaaccattttatttcagcttctcctaaaaatacataaaaagcacttactagaagtcattcctggttgtggctgccccatgttaggccctgtgttcataactggcaccatgcttgcagcacttggtagcatgttctgtttctgtagtctagtccttcgcttttcttctagttccttctgaatcttatagatcttctcagctagcaggtggtagtattccgcctttttgaattttgttaagtagagatgaggaaaaaagatgaactaccatcaggtaacagaaaaaatgaactaagagcaaacatttgcttcatttaaaacaggcagaaatgaaaagggaaaagaagcattctaatctattttcttagatcattccaaatatgagctcacatttaaaatgatcagtaaaaaattgctatataatgaatctacatagtaaggcatgacttctcaaagtacaattcccagcatgtgcaaagaatatgctacttcttaaagaagtgcgaatttaaagaaagttcaactgatacaaaaatactacttgagatgaagatactaagcagctgattcaccaccatattccagtgaaaatagcatggagcatggtaacagctcaaccactttttagctgccagaaggacaacccagataaagtgccacatgagtgcgctgtattaagaggaaaatgtaagattcttgacatacactttaagaaaagtgttttgttatcacaactccacagtgcattacaggacagaatggctaaagggtgtcctctgaggtatagtgttctgtgtacgtgcaacaaagaggaaaaaaaataaacaaccagaagaggtccacttttgctttaaatagaaaaaacagatgcttactcgattgtttgccgattcatacatgtccccttccactttccgggcatatgcaactaggttttccatccgtctgtcttttaaagcagcaggatccggagtgggaaatatggcttgaacactaggaatataaaatcctaccactattatatcacgtcagctttttttttctcatcatagaaacacacagtattttaaatattttcctggttagtattttctcatttttatacaatgaatactttgggcaaaattttaaaataaggcttgagatgtgttcaaacataaattaccgaccaaaagaagtgtctgtctgtattaatcaaatcaaagggttttcctgatcagaatataagaaccccatagaaatactctctggtccctattaccctaatgtagggggaaaaaaacacacctgtgctatctgcatcacgggaagtgagaaaacctgacctttactacagcatcatgtagcaaaagccttaagattcttctactctcatactcagcttagtgaaataaaacctaataatctctacaaaatcttaaaagatcaaaaacttgaagtgaagggagcaaaaatgcaaagaaaattctgctaaattcaatgtcttttactctctacaattcctcaaaatgcttggcactaactttcctgaaggctgacaaatgtgatttcagctatgaactttatcatctggacaactcatggtcagctgtgtgttacacctgaaggaaccaggtggagaagaaataaatggaaatccgagttagtaaaaagttctcaagcatataatactaacattaagtcagatgatcaatcccaaatagcctattgtttctattaagtttctaaacaatttgatcacaagataagtttgttttggttattccttattaattcattgtattaaaaataaaatctcagttttctctttgtgtcaaattccatttctggtgctatcatttgagaattcctaaacgaagctcaagtataactgataagctaatgtaacataaaaataaactaagaagataagacagactacctggtttcaaggtaacaaaaaaaactggatgaagtggagatccctctgctctatttttagggtactgggtatattacattttaccattttatatgccttacgcctctttcaaccaacaagacagtgtttgtgaggcagtgtgcctggcatacactaacttcacaaaaaacagtgcacaggtatttcacaagtaattgctatgtacacatcagaagaccagaagaccagagaggccacccaaacagattcaatttgtcaaaataataaaaattttaccaaggataacagaaggctgtgttgccactactattctaatgatctaaattaaaacctagtttttcttttaaaatatcagctttataaaggaaatgattatttaatatatattgattattgtcactagacagaatcctcacacatggttaaaagctaaaagacacctaagaaatgatggagaagaagttgagaagcagagaataggaagcaggaaagccacaggagaagtatcagcagcaaccaggctatagaaaaatcagtaatttctcgtgtttaagtgcctggcagattgaccttgtaactccttatgaataagacatgccaacaagcttacagtttgtggacaagatgatttcgaagatcctgagtaatatcttcatgccattgcttccgaattccagtactggatggttgagctgctgttggcataggacccagagaggccacactgccattgtcactcatcattgggctttaaagaggagtgaaacagttttagcaaagaagggtaggagaaagaggctctcatttaagtagagattaacagtgatgactgcaatagggccaatacactatgacaagtctatttacacataaatctgggggaaatggtatgtatgtatttgtatttgtgaggggaaacaaaacccgcaacatttcattgtgtggaggggtggctgatatcttatgtttaaaagacacaagatatcttgtgttagaagattaagccatcattttgacacagcttacccaggaatccactgggcaatggactaattgctagcattgggataaagcaaacttgcttttaagcaaacttgctttttaagcagctgcatttgttaacttcctactgtatttgtaaaggtgtcagttactccaaataattgatataatttctaaagaggttatacagagcctaaagaaaacacatcatttgttatcattcatcaaggatattgtcaaatcaagtaaacttataaagcccagatacggagctctaagtgtctgaaatctgacaaagggcacaagccaagattaaaacttacttttgagaatttatggctgaatgcaacatcgagtcagaaagaagattcgacggttgaacccctacacctccgtttactcccataggactagcacctacgtcaaaaataaaaagcaagagacggtattttaaataccaaaaaatgataacaaaaacaacaaaaattaaggataaaaagaaaggaagaggaaaaactatgatagtactagaataaaacattacaagaattttttgtcctttcaaaagacccaaaacagaagttttaaggatatttagaaatgtaaaagtaattagtagtaagtaaaataatcaccataaaccaagtcaagagacagatgacaaatctggggggggaaatgataatatatgataattacttgcaatataatcagcaacacatatataaaggctactacacaaagtaccttcatagcatagtaagaaaaacatgaacaagaggaaaagaatttacataaaaaagaaatacagtagcttaaaaaatatacatgaaaaacatataattttttttatgtatgaaattccaaaaattttttttgcgggggggggggggcgcgcgcggggcactgggcttgtggaattttagtggcttgttggggaccttagttccctgaaccaggggttgaacctgtgccccctgcagtggaagcatggagtcctaatcactagaccatctcagggaagtttgagaatacaaaatgttgagaaaggtttgggaaaagaagcattttctatgaaacttcataggtgtgtaaactgatccactcttgggaaagctatctggtaactgttaaacaaagggaaaaaaaatgtacacacattttcaccaacttagatttccacttgctattccatcttacagttatactcacacatgtatggataaagataagagtaatggtgtcaaaaggagcaaaaaactagaactacaattgtttaaggaaccgaacttaacacatgcacatgttttcataagcaccatctatgtaagaacataggcgacctaaggatgatgatccccagggaggggaatgaaagatagtatttgcattacacattttaaattgactactccttcaaactggcttggatagctctatgtattcctattacttgtttaattaatgatttaatgaatattacttctttaaaacaaagaaaaccatcaatggcagtatttatactaaaccagattttcatgtggttaaaattttttgattaaaaattttattaatatatccttcaagatatttagttaaaaataagaaaacaaaactcctccctaaaatgcaaataattgactggatttctcaacagtgtctaataaaaatcctactgccttctttcatcacacttcccaaatggttaggcagaactctcctaacagcatcaaggcaggctctgaaatgcagttgctggtagtggcttatctgtcactatgaaacattcatttttaagaaaattacacatccttaacacagatttgtttcactggtggcaacagtaatgaaggtaaagaaaaaagtgattatactattaccgatttgcttattttactgccttctgatggcataggaaaaaagatatcgacattctctccaaagtatccaggttcatttaatctttggcactgactgcaagtaatggctcaatctaacttgagaaagatacctttacacagatttgtatataagaccctaagagtgagcattcacttgagatacaaaaatgtaggaataaaaacactactggcactgacagaataagtcagaaagaaaaaaacaaatgaacaaaagaaaaattcaaagcacctaataatcaagaaaatacgtaatattttaagccctagggagaatcttaagccttaggagaacgtatatttttttctaagccctgacaaaatcattatacattaagtgaatctaatagtaatcagaagattaagaatgtggttaaacagggtcatgggggccttacagtaaaaagttctaatgcagagttccgggagtggctccctccttcccctctctgctacagaatttgtattacctgaaatatgcagtagagatcctgctgttttgtctatttgttcacttacctgctcatccacactaaagatgtctcaaaagtagggacaaccaattactgagcccctgtgccacaactactgagctcgcaagcctgtgcttcgtgacaaagagaagtcactgcaagaagcctgcctaccacaacaaagagtagcccctacttgctgcaactaaaggaaatctacgtacagcgatgaagacccagtgcaacggcccccaaaaaatggtaaaagagatcaaaattttaaaaaaagaaagactcagaaaggtaaaagaaatccaagaagctaacttgcaaataaattaaactcctctctcaataactctttaacaggttagcattccttgttataagagtgtatactttaagttaaaaataataaaaatcaacaagatttatatttttatgagtagtgtgcccaactctgctctctcatttagaatcaaataatgtgcaaaaactaaagcctattgcacctatcaatagaacagcaaaaatgagtttgacagaaaaaagcatggtagattacttcaaatcagactgctgtctagttacagagaacttcattaccaagaacggttttagagtaagaagcaaagtattaagtcatgggcttaccaaaactgctttatagatgtttaactgcttgacagtaaagagataagtcttagagccaatctctttccccatataattacagaataaaaaccaccctcaaattagggtataagaacactgctcactcttcccttccctctgttctataacagaaagaggttaggcaaacaagtgtatctgataaactatttcaaaggcaaatcactccaactaccagatacattgaaatctatataaacaataatcaaacacctcaaaccaaaagaatacttccagcccaaacacaaccatttctttctatactttaaaatatcaaaaaatttggaaacttaaatgtccacctgtaacaagactgttctatacaacaaaatactacagaagcatcaaaaaggatacattaggtacagaaacagaaagatgttcacactgtattaagaaacggtctgttaaaactaatgggatcccattcctagaaacagaaactaatatatgcacaacaagattaagaaggatatacatcaatagctgtttcctctggtatatggattacaagggtatttttacactattaatcttttaaaagttatttcaaaaaattaatcacataacagaaacaaaaaagatggggagacgggggagcaaacagagagggagtaaaagagacatacgcatacacgcagactaaaataaaccaaggagctacccttgcatgttacacggcaatcacacacacagctggtgtcacctctgtcatgacgaggaggacacagacttactcatgttgctcatgggccgcatcccttggggagactgcccagactgctggttctgcggattcttcgcttgcacctggggctgggtcggcatctgatttacttgatagggcagtccaagggctgcataggctctttctatagagctgggatcaatctgactgacagtgcttaggctgggagtggactgttgacccacccctagagagctagtattgccaagtccaactggtgctccagtcaaaattgctagggaaaacagaagaaagagtattacaacattaaagatgctgagacaggaaatactatcatgtgtgagttttaaaatacaaaaatactgttgtgtgattatgaaatacatgcaccttgtttcccattatttccttaaatttctaagcatagaactgattggtcaaagggcatcactggcatgaaaaacttttgatccaaaatacccaaaagcctccccacaagctgtatcaatgttcccaccaagaatacatgacagcgtgacaggaaagaaatggtattttatttcattacttaatttaatagggaacttttgggtatttcctccttctagtgaactatttcctagtcctaattctctactaagatatctatgatttatttactaatttatggaatttcattccttttaaaaatatgctatatacagttccaaatttatctttcaatcctaaatgctaccttcaatcctaaatttaggatttaaatttttaaatcctaaatgagacatggtggctgcactttctacttttgatacttttttttctctaagaaaagctcatcactcccaggcttctaaaaataatctcaaacttttcttcaacattaatttcaaattatctaaatatttagatcacaggtagagaagaagaagaatctgcccaatgtcaaagcaatgatctttctggatcttattttaagtaataaatacttcacttctaaccttattatcatgaagtttgtgataagcggaaataatctaggatgacagcactggcagtcacaggaacttcatataatcaagaagtacattaaatctcaccaaactgcactggtgaagagtctaagaatagtttgatataaaagtttccaaagatttcatcacttacactgttgatttctcttatctccagcatttttaaggggtagacacacaggacaatcatgccttgtacaattcttccagtgtgaaatgatttgtcgagaagatgcacagtgtgccactaataagaaaaatgattttttacattattattagctaacttatcaaccatataatgagtgctacaaatgttattaatacatcttcctaacaccccctaaagggtgtattcttgtattttacagttgagaaaataggcaaaaattggttaagtaatttgaacaaagtcacacagcacccaaagtgggattcaaactcaagcagtctgatttccagaacctctatttttgaccacaacactgtgtgagaaaaatctttaaaaaatagatttctcttaaaaaaaaaaaaaaaaaaaaaaaaaaagggtacagggcttccctggtggctcagtggataggaatctgcctgccaatgcaagggtaccctgggtccaggaagattccacactccacagagcaactaagcctatgggccacaacttctgagccctcgagctctaggccagagagctgcaactactgcagcctgagttcctagagcctgtgctctgcaacaagagaagccaccaccaggagcagcccccgcggcctgcatgcagcaatgaagacccagtgcaaccttccccccaaaaaagggtacaaatgaacttatttataaaacagaaacagaattagagatgtaaaaagaacttctagttactgggcaggggaggtggaaaaattgggagattgggaaggacatatatatattactatactctataaaacaggtaactagtaagaatctactgtctagcacaggaaactttactcaatactttctaatgacttacatgtgaaaagaatagagagtggatatatgaatatgtataacatttactttgctgtacagacacaacatcgtaaagcaactacactccaataaaaaatacagattcctaatggctctataattatattaagatgggtaacattctttttagtgtttgcctacatgacagcaactctcaatatttaaagctatgctggggcaaataaaagttccttgcaaaagagaagtctctaaaacttcctctactaccacatctctagatactcaaaaaatgatactgaattttatcctaacatagagtaaggcattatcagtaaggagtctcaggagagagaaaatgtgatcagctataactataaataaatattgattgcgaagcataaaaacctctgagcccactcaccttggcaggacttgcccgactggcagtgtgtcatgtggttaaggacgttcttcatggttcgacagtggggaaggttgcactgcctcacctccccgttggcctgctcccggcgctggcacttgtgagcgtgcaggaggaggacaagctgctgctggatgagcttgcgcttctccggatcagccgtatgtgccccagaacccatcccctgggccactggagccaccaggcctggctgctggacctgtggggcctgctgctggccctaagagatacagaagtaaagacacatgcaatgttaggtgtcactgggtgctacctcctgcataaatacggacctggagattttcaatgaaaacctttaacgacatgtcatctactaggtgccagacccaactttttaacacaggggattctaagataaataaacgatggcttctgccatcaagaagcttaatttaacaagaaaataaattactattactatattaacaagtaatataatcaaagtatgtgtaacatacagagagtaaaagaaagagaaggacatggtaaagtacagtgcaacggggtaaataaaggaatctgttgtgaagggcatgttcaagttaggtcttgaaatagtgaagagcttctcaggagacctggcaggggcctttcaggtgggtgaaaaactagtttttgtaaactctggacaaaattcgcttttttctatagaaaaataaacatctctggagacagagaaacgtgttaatcttttgtctccagtacttggcagagcatctgaaatacaggcattcaatgactatgggacataaagcaaaaaacctaaaatatctgaaaaggaaataaaattcctatagtacaatttttgaagatgaacatggactatttgacacatttacaactagaaatagttttactttagaaaaacagcaatgttagaagagttggagattttcccataacaacagtcactgttaaaagtaatgtttaactttgagagggagggaagttacttctaacagtatcagatataaatcaatagatatccagatgactgaccaaagaggaaaatggttccactttcctatcctatagaaagaattgcgtatacaaggagctgaatatggcaggaccccaaaactttcattgtggcagccccatttacttctgtttggactaacacccttactggtgttagtttttttacctaaataaacaccatgtgaaatggaaggcaggcataagcttccttgatcacagggaccatcccattacaccctgttctgctgtaaagcagaacagaaaacataaaagttgaacagaattcttaaaaaaaaaaaaaaaaaatcttttggctgcaccaagcatgcatggcatgtgggatcttagttccccagccagggatggaacccacgccccctgcattggaggcacagagtcttaaccacgggaccaccaggaaagtcccaaacacatttcttttgctcaagtgtcagatggaaaacaaatctgcagatagattactacccaccatattgggcattcctccaccaggaactgcctttttgtccattgcaaatggagataagctatttggtagtacagactttgtcggaatctggagaccaaggccactggctcccatctgctgtccagaattctgagtgtatggtgaaccgtaaggattagggttgttcatcattcccatctgagaacaagaaaaagaaaagaaatcacatcttattccccacactaacaggacagactatttcctttccttttccacttcctaatttacagagacaatttaaaaagaaattctccgtatataaaaagactaggggcctgaggtacagtaaatttagaggtatttcctgtatttatgagatgttaccaaaaatttgtcttcatttagctacacctactaagcaggttctgccattcatctccactttcaatgtactaaataactttcatttaaattcaattcaactcaataaactatctaatccttaaatatattagagaacttgatatatcaaagcatttgaatgcttattccagcattaaaaaaaaagggggggggacttcccttattgtccagtggttaagactctgcttctagtgtagggggcatgggtttgaagtcagggaactaggatcccaaaagctgtgtggagcagctgggttaaaaaaacaaacaaacaaatacccaaaacaaggtagaaaactggtcctttgggggatatgtctttttttaaatttagggacacagtagaacagtgatttaaaatttttttgaatctgaattatctagatacagcatgtaaactttaaagcctgcatttcttggtagcttacacctagctgctttattaaattgcctccttggctcgtaaagtaatctgagtgtatttgcaatccctatgtactctaaaaaggaagtttgggggcttccctggcagtccagtggttaggaacctgcgcctccagtgcaggggacacgggctggatccctggtcggagaactaagagcccatatgccacagagcatggtttaaaaaagcatttccctgtctttatctaagtccatgtggaaccatcatactgtagcttaaagaacacagcattaattattcaaaagccaaatgttttattggttaacaatgatgcaactcacaactctattcttccacataagagccctgtgtaagttaatcactgcctacctgcaagcactcaggagagaaactaaggatgctaaaggagtcacaccagatttctcacctttgtcagacagatccaatcctatcacagggtccttcaaattctatctctagccaccgagtcccatgtatccgtgcccactatcactgtcttaattcaagtccctgatcacagctttcgtaggctgttatctaacaggttttcctgccatctgtcctcacttttttctactcataagggggaaaaaacgatggtataccagacctttcattatcttcacgagaacttgactacttttccatggcagaagtactccgataactggaatttcctatgtgaatctgaccagtgaaaatgtagggataatcaaatacaaaaacaggcttacgtgaagttccagtttctcctggtagttccaaatggggctcagagcactgctgctccatactgcttttaaagtactgatatttacactaacatagttccaacagtgtgatcgcctacacttgggggagttggatttcacttgtgtttcttattagcatgggaattcacggtagatgtaaaacgaaagccatttaagagtccacaatttatataaataaaacattggaattagtaagatgccttcatgtctcttgttaagacgcataatgtctttatcaagtacatcctagtagagtttggtccttcacacatttgttcacatagacatcaccttgactgcctacaacaagtttcagcaattcctgacattgcttgttccctcaatcacaatgcacagcctgggaactccaggttccctctagcagaccctggtctcaaaaatatagactacactaactgctgatcagatggcagtaattcattcctaacacttctggtcactgggaccaacaaagaccctcaggctttctgtgtgccatctccctcagagttttgctgcccgtgttagaaaataaacacaaccaaccccctcacccctaccgtttctatctgctcaaccccctctactctctaagtataataggaagggaatatactgtacttaatttctgctacactgtagttagttatctcatcttgttcccttctctacagctaatgtgatccagatgtccagctacctaccacctacctggaccagagcgatacagacctccacctcaaatgaaaaggcagaggaccaggaagccacagttagttctaggcaagtaaaaccagaggaactgcaagggagtattttatctttctttaaaaataaatctgactctacaggttgtttcttagtgtccaatgcattaaaaacagaaacctagggaacacaggaacacgtaagacacacgatggtaacaaacactggcaaacaaaaaccagtgcccaaaatacaatgtgagcatatctaagagacagaatccccttagtaagacttgcatgtatcaacagtaacgcacaccagtagtaaatgtgaaacatgaaaatgtgactccatgaatccccaaataataaaaacaaaattaaactacatcctgacctggtctacctaatggatttgataaatacatctatatccagtcattccccaggcactctgtcaactggtggcgggtgggagaggaggtggcagggagatatgtacaacgataaacaaggaagactagggatctttcagaagtgaagacacctaatcctaaacattttccatactcattcctgactcttacactactgacttaattcaggggcctcacctccccatagggactatttttcaaactgatacagcacatctaaaaccacacccatcaagattgcaaatttgggagtatgagtctcctttaaaatccatcaggatttggcataacaacttgtctttttctctctcaggatggattcttcctctctgccttatacttaatactcttacttttaaactttacaggttcagtactcatataggtaataaagtctttatatttgaattactcctccccatgaaaatataggctccacagagccaaggatttttttgtgtgattaatttactgctatatatccaacctgaaacaatgctgatgtagaaatgtgtgattcagattataaatagaacagtgacccactctcaacctaggcattctcctagtgagccttttcttatttttcttcacagcactatctggaatactattaacttacatcttatgtgtaccctagaaagtaagttccatgaagtgagcttattcactgctctagcttcagcatcaaagctacgactcagtaaatatttgctcaatcagtgaaggtgtaatgtttgtcatccctgcccccatataaacctcaggagggcatggactcttaataggcatatccctagaatctagaagaggtacttaataaatcctgtagctataaaatatatatacacacacacacacacaccacacatatttaagggctttcatttatctatgtgacctcagggttcccactcccaattcacccacgttttactttcattctagaactctcaccatcatgattctcaggaatacataagtcctaatgttgctcaaattattcctcttacagagcacgcttgctcctaactccaagtgaaaaatctctcccacctctaatatcaccttacaagtgaagccatctctttcattcaataagaacttaggaataattacatgtcagagactggcaactacagtgtgatgtcatttcaagaaaaaggaataaaatgtgtaggaagaatatggaggaataaacatcaaatatacgctgataaaattttaattatacagagtacatatttaaatgtattttaaaatgtatttaacattctctacttgataaggctaagaaagtaggctttttaaaaaagaaaagtctttcaaataacagccaagatcaggttaattagaacacctggaatgttggttggggcttaatggcaaactaacacatcttagggtttcccaggtggctcagtggtaaagaacctgcctgccaacgcaagagacgtgggttagatccctgggtcgcaaagatcccctggagaaggaaatggcaacccactcccatattcttgcctagacaatcccatgcacagaggagcctggcaggttggagtccatgggtcgcaagagttggacacaacttaagtgactaaacaaaaacgcatcttaacatccatcaaccaatatggaaaaaaaataacacatctcttaaaaaccagggacattccaagcaatgcgaacaaatgaagtctatctgaagatagtatgccagctctctcaaaactgtgttttaagggaggctatgaaggctaaaatgaatgaaaatattctaatatttgtgtcacagggaacaggaattagctggcaatcaatttgaaacaaactgtgaaggtaccttcacagctgttaaaataaatgtatcacttacatttaatgtaagagcattataaaatttgtgacaatagatccctggcatagaatatgtgggaaatgctacataatataagattaaacataaacagtaaagaacacatgagtaactgacctcaggccctcctcctccacccctgaacactcagaaatacacagacagggcacacaaacggaaactgcactcaccttaagaggctgggggcctctcagtcccgcctgtcctcccatctggggagagccttgctgcagtggctcagtcatcaagttgccagcacttcccatgcctgggtttgggtactgcatattaggtcgcccccggcctgctccaattgaaccgttcatgacttgattaggcatcatcccttggccactgccggcagtcaacattccaggattcatgccagcattcatccccgtgttcattcccatggcaggctgattgactggactgctcatcatacctgttgcagatggtgtgggaccctgatttggtccaccagtgcccatccccatgttgggagaagtcaagcctgcctgggccattgggcttttgaccatgctatttatcaaacctaatccaggactgttctgttgggcttggctggccatgccttggcctgggccaccaacccccatactgaggttaggggaactaccagaccgtagcaattctgacagttgtttatgtttagaggctgcatcttgtactatgccaagacttgtctgaagctgactaatatcaccaccattggttagtcccaattctgtagagttgattaattcatctggtaagtcgtgctccaagtcaaacagagagccaaaatctaaaaacaaagaggaaagataaaggttaaaatgtgacagtcaaaattacaaatttctctacacttgttcttgataagcattaaatgtcatttctaaccctcagcccatggaatactatctgcttgtattagtttttcatgttacactaaagttttactttacatgtttgtgtgtgtgtacaaataaaatatacataaaagagtactatcatgccaacaagtttaaacatttataaactgtacctaaaataaaaccaaagaagaatacatattagtgtgatagccagaatttcttacaagaggttaaaataactaatctgtacacagactaaatccagaatctatacacagacttaattcagaatgaaacaaaagattaaatatataataattataaaaaagacaactgataaaaaggaaaagatctgttctttgtagaccactcagggtaagctccaggaagacgggggctgcttacctctaattgctatcacacagcgcctgccacaaagctgaataaagttgtgttcacctgacttcaaaccacagattagttttccttaaccaaaatctagctgagtaagatatgaaaccatgcgtctagttccttcaccaacctacaaaccattaccactccatctccgccctacccctgtgccaaaaggaagatgtgaaaattacagattaacctaggcttccttgtccttggcactactgaacattctaggctagataattctgcttgggaggaaggaaaaattgtcccgtgcactatgctcagcaaatccctggtctctcttgttgatgctagtagtacctctaccaatttgtgacaatcaaaaatgtcttcagatatcaccaaatgtgccttggaagtgcaaaactgtccccggttgttgacagtattaattcattatatgctgatggtggaatgtttccttgtgtactccagggggacaagtagaatgaaagctgcttaaaagtatacatgattgctgctgctgtgaagtctcttcagtcgtgtccgactctgtgcgaccccatagacggcagcccaccaggctcccccgtccctgaggttctccaggcaagaacactggagtgggctgccatttccttctccaatgcatgaaagtgaaaagtgaaagtgaaggcgctcagtcaagtctgacccttgcaactccacggactgcagcccaccaggctcctccatccagtgttatgtaaatagaaggactaaggtgttttgagttttaattctccaagtagttttaacattaaaagggcattgctgaacttccttggtggtccagcggttaagaatctgcctgtcagtgcagggcatacgagttccctccctgactgggcacgggggcatgtaaacctatgagctgcaactacgagcccaagtgccacaactagtgatcccacgtgccctagagcctgtgctcagcagcgagagaggccactgcaatgagaagctccagcaccacagctagagaaagactgcacgcagcaacgaaaaaccagtgcagccaaaaagaattaattttaaacaaaaaaggccctactgggtgtttaaaaagtaaatatagttgaatctacaactgataatcctattaaagataattcatccaaagacaagataccactttaataattatcttcttggtctaattaccctcagttcataagtacagttcttcttttatgtgaacttcctgttcttttgcattctgtcatggcactgaaattacgtatgtgtctttctcttcctcctctcctgccatcttttccccaccaccacccctcaccccacctatgcacccagactgtagctctgggaatgacatgagttacttacttacaaaccaactcctcaaagggtgatattttagttgaactgaactgtccctcaggctctcagaacgtgatttagacagagtacaggattattctctttccttctgaaaattcatgtgcccctccatcataaaaataaagtatctcatgattagttctggaatataaataaggtctcaaataaaattttcctgacatcactactcaagacaactgcttaatataattacatatttccttcatttccttctatttacataattcacaacactggaatcatacaaacttttaagcagtttgcattctactatccccctggagtacacaaggaaacattccacatcagcatatttttagtgtttaagaaaaaataatctctacctatttagaaattgaaaatatacacacggggaattccctggcagtccagtggttaggactccgggttttcactgcttgggttcaatccctggttgagtaacgattgagaatacatttcaaaacttaaaggaaataaagctagaaatcaacaaatatctaagatatttgggaaaaaaagtaagaaagagatgatcaaatacaaaagcaatgcaacaaaaaagaaaaatggagaggttactaacaaaaccataagttggttcttcgaagagagtaatgaaagataaacttctgagaaacttaaggagaaaagacaataaaaagagaaagtggcattactaatcaattttatattaaaaaaagagacaaaattaataaattcctgttaaccactcaataaacctcaaccaaaaggaaattatacgtatccctgcatctccaacaagtcaatggtagacgttctcaggagattcaacaacacctcgtttgaatacctgattcaaacccaactgtggaaatacattttaagaagagaatcaagataacacaaatactgattaatggataatattaagaaaatcattaattttgttgggtacgacaacagaatagttattaaaataaagcctaagagatacattatttaagcatttctagtgaaacaagaagcctggaatttacttttaaaaactccagcagaaaaaagaggggaggaggggacaaaattattagtaacctgaagtaacaggcacatgggaattcttttttttctattaaattgaattcttccatttaaaaagtttaaaaggaaacagagaaagcctgaatattcctattactatcaaaggacaattgcttaattttcccataaagaccaaatataagtatttttgcaggcatgtcctactgaacttttaaggaaaagacaattcaatctcacacaaatacttctagaaaacagaaatattctaaaaaccacacatggccagtacaagaaaagaaaatcattaacacagaagcaagaatacttaaaaaagagcaaaccaaatttatcagtgtcttaaaggtgtaatatcatgatcaagttgggatcatctcaggaatccaagaaagagaggtttgcatattcaccacagtaacagagaagaaagaaaacattaggttcaatgactggaataaaagcactggataaaagtcaatacccactcacgattttaaaaacaaaactacagcaatcaaaacctgatgggaaaaagaatagatatgcgtataactgaatcactttgctgtagacttgaaactgacacaagtgtaaatcaactatgctctcgtctgtagtcgcatctgactctttttgcgaccccatcgactgcagcctgccaggatcctctgtgggattttccaggcaagaatactggagtgggttgccatttccttctccagtgtatcttccccatccaggtattgaacccacatctcatgcattggcaggtgactcttgagtcaccagggaagcctgtgtaaatcagtaacactccaataaaatacacacacacacacaaaaaaaaactggtaagaacgtccttaaattgataaaaagggctcttccaaaacctaaaaactgacagcaattatggataatgcaccaacattaaaaatagcctcttcagcatcagaacaagacaaagatacccaaaacaaccatttctattcagtgctgaactggagtctctagtcaaagcaataatacaagaaatatccatgagtcaagactgaaaaggaagaaacataacttactgtatgcaaacaatacacctgtcaacagtgaaattccgaggcaaagaagtggaaatagtaagaggttagcaaattaaattgcatttctgcatatcagcaaaaaatgattagaaataattttaagaaatggggggaatcttctagtattagaaaatatacatgaactatgaaactaaagaccatctaaataaacagaataacatcacaaaacatatgggtacaaatcctcaatattacataaagacataattttaagaaatggggggaatcttctagtattagaagatatacatgaactatgaaactaaagaccatctaaataaacagaatatcatcacaaaacatatgggtacaaatcctcaatattacataaagacatcaattcttccccaatatagacctatagattcaatgcaatgccaatcaaaattctaacaggggacttccctggcagtatgctcccactgcaggggggcactggttccacccgattggggaactaagatcccaaatgccaagcaataccacccccccacacacacaaaaaaaaaactaacaaattttcaaaccaccagacaagactattttaaagtatacacagaagaacctagtttccacaacaggaaaagtactcacttcatgggttatttgtgagaattcgacaagttaatataagcatttagagcagtgcttggcacatattaagaactatgaaaatattacctattattattcaatagaatcctcactctattagcaggtaagactagcttagttacaaaaacaaatttttataaggcacttccaatgtgtcatattgtgtttcctcaataaacacattattctcattaatcctccaagaatctcagaagtagttaaaagccacatatagagttcattgaggagaaatcaacttcagtaatacagaagccttactctaggccctcatcttgaggatttaacttaacctgtactacagccaaatctgctgcactaggttactgtttcaaaatatccaacatctcattacaaagttaggctccactgtgaaacagataggaaagctaacactggtagaccttgacaatgggttgttcttttaatggcaatcctgtattttcaacagacctaattcagtgatcactacaaaagatccactcaggtttcaactcaaagtctgattcaagtactcctattgtctaagatggttcactgttacaaccgcaattgtgtactccctatcttctacctgttgttatagctaaatatttgtgtgcatcttctttaccaaattttaagtattgaaaggtaagggtctcatttaacatttacatttcccatagcacctcacatatactcaataaatgaacatgataataaacagttccagcaattctgcaattgcacactatatttatatctgattgggtaatttacaaatttataaaagttctcttaacctttccttaaaacttgttattttcaatgattaaattaattaaatttggaagactatgccagagtgtcacgggcttccctggtggctcagtggtaaagaatccgcctgccaatccaggagacacaggtttgatccctgaatccggatcccacatgctacagggtaactaagcccctaggccacaaccaaggaagctcacgcacctacagcccgtgctccccaacaagagcagccatcacagtgagaagcctgtgcactgcgagaaagccccgctcaccgcagtcagagaaacgcctgcagagcaaagaagactcaagagtcgcatctactttgacccatgactaaacagatcttactatttcatttgattaccactgactgttctgagctagtctgattgtgcctcagagttctgcacatttaggattcccaaatgccatcagccaccactggtacctaacttagcacagttcaaggggtccaaatagctggggtttaaaacctaattcttacaagctgacttaatttaccaattactttccaactgagctcatgttacctcttctataaaaagcctacttattctacccccatgaatgaatggagttttttttaaaagaacgaacaagatcgttcttacatattaaaaaaaagtaaaattccaaagtatataaatgtatgtgtctattaaaaaacgtgtaaattcattaatcctctttttaaagttatataccatgcaggactgagcaaaggatcctcaggatcacttagtggtgtttacttgcaaacagacaaaatataaaagcagaaccatattgggcttcccaggtggcgctagtggtaaagaacccacctgcaaatgcagaagactcaagagacacgggttcaatccctgggtggggaagatcccctggaggagggcatggcaacccactccagtgttcttgcctggagaggcccatggacagaggagcctggtgggctacagtccacggggtcgcaaagagtcagacacgactgaagagcctgatgcccagcacacactgggtggggaggaatcgggagagcgaagatgcattttcctcaggcctctgagagaacactgcccctcccagggagagcccaagattagaaatgactgattctctcattttataggtgcagttagtgatccgtcactggcttccctgagactgtactattttgttactgaatagggactctgttagagcccctggaccccagctgaatgttctatgtaagtgagcaaatagacttcatttttagcagttgttttagagtagtagtgaatcttatgagaagtataacttttctgaacatttttaaactgcgaaaacatttttaaacaaaacttaaatacttacagactaagaaaaattacccaaactgtatcagttctatgttggtagagttaagaggtgggctcagttgcatctgtctcttcgagaccctttgtactacagccttccaggctcctctgtccatgggatttttcaggtaagaatactggagtgggttgccatttccttctccaagggatcctcccaacccaaggatcaaacctgtctctcctacattgcaggcagactctttacccgctgagccaacagggaaaccccaaagggttaagagtactaaagctcaataaatgtaacatgagggttttattttaacaatcaaacttccaatctttccccattaggttcttctgcaaggggcttccaagaaaaaaacctgattgcgagttcatgagcagcatataggaaaaagattactaaaaatgagagattatgtctttaaccagtttgtcataaacagaaataaaacccaatggtctaaaactagtagaaaagcaaatctcaaacaaaaagtagtatgtatgaagatgcaagggaaaaataattagaaatttcaatgccaggatttaaacaaacactgaacagtgggtttcaatactgaccagcctcaatccatgactcttactaagcttctcagcttcttccttttccttcaaggaaaggaaaaatataaaggttcaaataaatcaccttcccaggcccccatttcaacttgcccttcacagggattagttcagatcagctgaataaaatttacgcgttcaacaaataacagcagcaatctagaggacccttaacattaataccttgcaatttttactgtaaagagaaaaatttcccaactgaagagttttaagcaaaatatgatatgaacaaagggcttccctggtagctcagctggtaaagaatccacctgcaatgcaggagaccccggttcaatttctgggttgggaagatccactggagaagggataggctaccgactcaagtattcttgggctttcctgatagctcagctgttaaagaatctgcctgcaatgtgggagaccttggtttgatccctgggtgcggaagatccctggagaagggaacggctacccactccaatattctggcctgaagaatttcatggacttaatatagtccatggggtcgcaaagagtcagacaggactgagcaactttcacttttcaggatatgaacaaatctgcatgctctagcccactcagacaaagaagatgaagaataaatcgacagacgagtctagagtaaggcagactggtgaggaggttgctgctaaaggggcatcaaagaggtctatcagaagaactctctaactacagttgggggttacggagagaaagagagggatgactctgaagttactggcttggataacctggacatgcccgtatttaagggacaatgatcttgccagccaagaatgctaaaattcaacaccctcctccagcccatctaccaggaatactgtcctggaaaccaggttccaagaaggtaatgctcgtggtgttccatgcttgagagagaattcactgaatataggtaacaggagatagtcggcggtctaagttaagagcagtgaagtgcataagccagactacagtggactgagaaataggaggttaagatagtaaatgacagagagaacttttcctggatactaaggtgagcttctaacatgtttaatttgctgactcccctttctctttgattagaaatgtacaaatctgaaatttatcccattacctttaaagtatcccatgacaaacaccgtagaacggtatcacgaacaacctgaaatgaatgaactcacactatccagtaagaccttttctgcttactttccaaagtatcaaccgatcaacatcaacagcaggctacttctatcaaatagtttactgacaggtttccatatacagttctcagatgctcaaatataaaaggactttgactaaaatgcttcttcaggacttccctggaggtccatggttaagactccacacttccattgcagcgggctcgtttcaaccctgggttggggaaataagatcccaaatgccaggcgatgtggtcaaaaataatgtttcttcacctgagtatacattcagtccaaacatggtggcacaaaatgaggctaccaggacagattttaatctggtttgaaaagttcagcataatacattaggtttatccaatggaccatggataagaaatgtgacttatttaaacaaaaatgaattgggactaaacatgtaggaaactagtgttgagtcaaaacaccctttcattcttacattctgattctgtagattacccttggtgtcttctatatttctgtggtcctcacagaagatttagctgtatcatctcttgtacaagaaatacttagctgagaaactgggcacacgttcactactgtaaaatatataactgaagtataactttcaaaattaggattactaacaatataaccccaaacagtggattatctgagtataaagaaaagtttaaagctacaaactaggatgcaaaactgaaataattttggctcaaaatctaattctactgcataagagaatctcttgcacttactaattttttccccatttataaagttcaaactttattttctgaataaacaggcttactttttgtacttcaggtaagctgaattcaaataaaaactcagttctcttaaactgtgtacattaagcgaaataccggtacaaattattctgaaactagtcaatttgcaagtatctgcttaaaagacagaatctatccatccactcctttaagctagctttctctgtgatattaaagggcttccctggtgatattaaaactgcttttaaatgaatatacaatccagatctcaaaacctttctttaatccctgtggtggggccagaggatgagtaggaatgggacaagagtggagaggaactgagtcacagcaaactgaaggggagccaggtgagtgacaaggtgagcagagatctgaggttttaaaaaaaaaggattggagatgaaagtcaaatctacagaactttaataattctgaaaatggtttggctagatatgaaactatcaatctcacaaagatctctccttaatggtttggggcacttctattcttaaattaactcagctgttttgggtacttaaaaaatcacaatgttggcctttaaaatcaaggcaattttgtaaacttcatgataaataacttctactcagttctgtaattcagaagtattttaacactctgtagatgaagcagaattaatctaaccataaaaacccacctgtcaaggaaaagatcacagacattcaaaactacaatactgagcttaaaagaacactaaaaaatataatgaaatatccacagtgggggctccgtggtaaagagcctgcctgtcaacacaggagacaggggttcaatccctgatctgggaagatcccacaacttagcccgggcactgcaactactgagcctgtgccctaagggcccaaaagccaccactacggaagcccagcgtgtgcgccccagagcctgcatgctgcaagaaaaggtgctgcaatgagaagcccgcacactgaaactggagaaaagcctccgcagcaacaaagacccagcacagccaaaaagtatattatattaaaaaaaaaaaaaaaaatccacgctggagagacaggtaagacttctaatactttacaaaacacctctaagttatacaagtttgatcaaagacaataatcaatataagttttataatcaatattaagttttataggattacacagctatgcatgttggctggtgctgaatttcaaaagccaacaggcaaaagcatgtattaattttcaaaatatgcattcttaacagtcttgcaaccatgacatcaaaaggtgtacctatacttggggaagtgactgacctgaagttttattctttaccctaacacatttatgatatttcttggtgtgaaattaaaaagatgaggacactattattttcatttcaataaatacccactttaccaatcaactcaattacatgtttatattaagcctaaacggcatgctaacttaactaccactgatcatttcttgattttgagtatagtaacatcttgtgagcagctttgctctgagggctggatttgtttgcctaattggagtttgttccaagggaatgcctagggggctcctagagaagctatcatacccctttctttaaaaaaaaaaaaaaaaaagcttcctagaaactgtacatctgtaaagaaaaagagcatgactgtttttttaatcggcttattttctacatgtatgacaaacaactagtaacaaaacttggatcttaacaaaataaacaattcactttgaaaattacaacttaccaaaaccctcaaagacaaaagatacgtgcatgtccaagagataaacgacaaaccctagcctaggtcttccagctattaggttctgtcgctgttacctattccgtgcaaagcttctggaactactcttcccctgaccaggccactattctcataaaatgtttattctgatggtgagataaatgtcaaattccttagcatatttctgtctttttcaaaataggactctaatatccttttccatctgtctcctacgaaaacattccaccatatagtcatatgtgttccagtcacatataaaccacttatgtttgttccacctgaaataccatgccaactttccctacttcttgtttttgtttttgttttttaactgccccatgcagtttgcaggatcttagttccctgctgagagactgaacccaggcccttggcagtgaaagcgcgggagtcctaaccactggactgccaggaaattcccaactttccctacttctaagaaaaggcaggtcatgctctcctacccttattcaaatatacatttcctctatgaagtttttccctaatacttcaaacccattctgtcaaaaataatccctggacttacctggtggcacagtggataagaatccacctgccaatgcaggggacacaagttcgatccctggtccaggaacattccacatgcctcggaacaactaagcccatgtgccacaattacttagcctgtgagccacaactactgaggcccactcaacctagagccagcaagtagccgactactgagcccgtgcacctagagcctgtgtttcccaacaagagaggcctgtgcactgacagggaagcccccgctccctgcaacgagagaaagcctgcctgcagcaagagacccagtgtggccaaaaacaaataaatatagaagctgtacatgtcaagaaagaaagaatccctatcctctgccttcatctaacccattttaacaacttgtatcagagtataacttatggaaaaactgtgtagatatgtataccaattccagcagattctaaaggctttgagaccagagcctgcaccttgctttcacctttatgtgtgaacacttataacttggtaggtagtcaatgtttgttagctgaaatgaaaagttttccaaatgaaaacagtgactactcaattcaggagaactgcacaatttcaaaatgtgcaaaacttaactcaccaaaacccctcccccatccatacccacacacatctcttcctatgcttgctgtctcagtaaatgacatcctcatcaatcctgctgcccaaacttgaaatctgggaatttccctctctggcaatatcctgacatcaccaagctctgctgaccacccatgccccctcaaacctcacttcatctataaacccaggccactctcatcacaactgaaattctgaaacagttatctcactggtctccctattttctccttttcctttccaaaccattcctcatttgtcgatcatctaagccttagactctaaggtacaattctgtctatacattttaaaaagctaaaatggaaagtctaaactctagtaagcagtaaccccagtaagtcctgtatgactggccccttactaacctatgcagttatatttcttgctgtcccccaactagatgaaatgtaaagattccctgacagaccagactcttctccttaacctgggctcactcttagcaaccctgtctatccttcagatcccaagatcagattccagtttcttcaaagacagccactagagcaacagtagctacaggttaggtatccccatttctcccactgtacactgtacttcccaaatacaatactggccccatcagacttgaatgttgttctcctccccttatctgcaaaccccaggaaggaagggtccatgactttctggattaccaccatattcctcattctgagcataaatgcctagcacacagaaaatgttggtccaacacaggaaaactaactggcagcctgtcaactcttttaaactagtatttttcaaacactagtcatgagccacaagccatagtggctcatgaaatcaatgtagtggaccacaaccaccacttttaaaacaaataaaatgcaacagaaaatatcagagtagatcacaagaagtaagggtaaacaggataagcactgtttattcacttgctgagacagggtctctggttctccatgtaaaatgtagttcttattgggtgtggccaaaaatactgaaaagctgtaccctgctccttctacttttcttcctcctcctttaagaaagttttaagatccagataaataaaaaataatgctcaaccacatgattctttagaaaaaaagacattcttaccttgagcatttccagtaagaacaatctttcttaattgccttcaatatgtgacagtatgtatgtatgtgtgtatatatatatatacacacacatatatacacactcttgatctctgctcccatattcttatattctcaaaaaacttcacatttgagttgatgatgtataggctaactctgcaccataagccttacttttaagactactctcattatctttagccaacctatctatatatccattaaaaaatatacctagcactgcttttgtggggtatatttagcagtaaggttaaaaacacttaacacttaaaaagctcatactatgttacagcaagcaccatcctaagcgtttttaatatttacttgtttcatttagttatttggctgtgcctggtctcagttgcagcatgtaggaatctagttccctaaccagggatcgaatccaggctgcctgcattgggaccacggagtcttagccagtggcccaccagggaagtctctattctaagcatgtaataaagagaattctcatttattcctcaccacaatcctacactttgggcactacaggtgaggtagctgagacagaaagattaagtaactggcctaaggctcacagttaacaaaggcagacctgggatttgaactctgctagttggactctaaaacccattctcagccactcattttcccagtagtgtacattttactttttttcccagtagtttaaattttacactctcaactaaattactcctaattgactttgggggcatttattttaaaagatgtacattcaaaaacaaatgatatccaaattgttcagaataggccttaaaacctcaatatttattctcttaaatctttttcaagaactgaacagtaacaaaaaattttcctataaaaattttagaagaaaactactatccacctatttttaaaaaatcatctgcaatagccaatgttttaaatattttacacgtggcataatttaagtttcggcttgcccattaatttctcttaatgcctgccatagtggggggggggatcaacttcagaaattctcaaaggaggaaaccttaaaatttaaatcacaccaaacaagatatcttatttttccattaattgttgggtgtaagaactggcagaataactcttgaattgtttttgtaaatataccaggaagaagctttttacactcccacttgtatgtgcaacattcttcctactctctttttctttcctatttactgcttactgttcttacaaacccactatgcactaatactcaactttttgttttaattcccctccgttttatagaacagactaaggagaaggttcaaaagcaaagtaaaacagaaaacaatgccaaaaggcaaccaaggcagaaaccctttcctccctccccttcatccaatcgctggacatggcaatgcatttcttacctccgcaaaataatatgaactctagctggaaaagggaactctactgtgacacacacaagatttacaacttaacaaacgtcatcttatcttactatcaaccacagacaactttctgggagtgccataaatgaacttacaaagtcttaagaataagcaattgccagagtttaaggcacttaaaatgttttgtaatttaacttaacacaaggtcagcaatactttgctggactgaacagccataactcaaaaacttcagaaccacaactctcaagcaaaccttcatgcccccaaaataaaattaaaacatagttatcactggtgtaagagctaaaaaggaaatagtctccaatcaaaaatattttctttgatgataaaccacaaagacacaatggtgtcctaagaaagaaacagacatttaaaaaatccttgccatacacacaaaaaatccattgcataccataatctagtgttcaaatgcagctatagctgtcctttgccttcaaaatgaaaataggcataaaatccaagctaattctgacacagaggacactgtagagccacaaaactgtatcaagaccagaaagagcctactaaatataccagatcatgctgtcatgcctctttccagactgtccatatagcatcaagtgtatacaaagcagtgctagaacatgtccagtgagcaatgaaggcaacgcatcatccccatctttcccgtcactcaaggtatcaccacaaacaggttcaagaaatatctgcaggacttacatattaactattctggtcaataattttaccaaaacaatttgttttaaataaatgcttttatgatgcagggcggtaacagacgtggtaggacagaaagtcatttgatttctcaaataattctgatctaaccataccaagttatataaaaatttcaatggatcatgtgcgaatattgagacaagaacataaaaatgcaaaagctgtaattctctttctcctcattttgacatgtaaaacttgaacttaattcaagatactataatcaacctggaaaattttttagaagaatctctgagaattaaataagtcattttcattctgcatcagtggataaccttagaagttcaaatttggagattcaagcactaattttgttttgtaatgttttagcatgtcaacccaattgggttccaactttcttccctataaaactggcacacgcaaacactcttggcaggtacacgtacactattaaaactgcaagcctcaatcattcaaaaacagtttctggagtctagaatttggggatcattttgaacagttctagataaaatcaatcagtaagtactgaggcataacttacattcacatttataaactacctagggtggcaactctaaaaatggagaagttacaagtttaaaatgtaaagttttaaagagtgaagtgtttctattaaagttacctgcaaacttaaaactacatcgtgcttgatgtaaaaagtcaatcgatcgaaatacaatggtgcccaatgtgaagttcacagggggacagtatattcttaatgctcattctccttcctccagccccaatcaaaaaatccagactggtcaggattaaaaattagacaccaaccaattcctggattagaatcttacgcggggcggggcgggggtacaaaaatcaatcttcactacaaaatttagagaaaagtaactaagataaactcttaacactaagactgagttaaatctcaatgttgaagaactttttaaatataaaaacctacttgatacatttagtactcttacaattattcacaggtatttcaagtagcaaaacagtttctgtgtataagtcaggtgacacactaccaaaataagttaaagttaccaagtacacagatcaacctgaaaagaactatctgaacaacagagcacagtctccctttcaggccttgcagtactcccaagactaaactgcttaaatgaggaattggcaaaatagtacaggtaaaaagttttctttacaatatccccaagtcactggctaactcaaatctattactatattacacaaaaactaaacagcaaaaactaccacagtacacaaaaactaaagaaacaacacaaaaatccacaggtggaaaaggagtctaaaggtaacctgaaagtcctcccgagcgacattttaataagcgcaaaggaatacgacactcaatacgtgtatgaattctgagggaaaaaacaggttaaaaaaaatatccctgaagactacagaaacttgaagtaatgaggacagatcaaagttcatgtactgtcaacgttacaagcctgaagcagaagaactctgcaaaaatcctcaatctttgcaggttatcttaaactcaggatacatcttttaaaagcaaaaaatccaaaacattttgccatatccttacattttcacccatggaaaggaaaactacttagaaccatgctttagaagttctctacaaactcaaagggtacatttaactccattatgcactatcactggcagatggagggatgacgttgagcctgttttctcagggtgttaaagagatgctccgtagtaaaggggaacatcttgtagactgtcagatggccagccattcttcgtcttcattatcctggcaccttaaacaactatgacagccaaagagaaggtcggtgcccatcaggatagcaccaaactcactgtgagaagggaatgatacaagtctcatttctcttgacaaaaggctggtccacaactgagtgaagtaaaaaatttgaagtttttttaaactgcaatctggatccccatacattgtttcaagtgtaaaaagacaaaacctacaaatgcaaaacttaacacacattttaaattcttgtatcatcagtttgtgggcagttcttgattgggactctcaatttctagtcttgatttccaagtacataactccacagaatcagttaacccaactcttcccaaagtaactacaaattgcaaagaaaatgcctctgctctctcccaacctaaaaccccagaaattcagacattttggtctggcaccagagaaatgagagagataaaatgaactgcgctccatattgattttaaaagcaaataagggggcggagggagctaggaatggttagtaaaataattcataccaaatttcaggtttgacgtttaacttcacatcaagcctgaaatcctagatctcacacccacaaacaagtaaaaccaagaatttttacaccttcattctcaacagaaaattttatgcaaaaaggaattctttaagagtagtagaaagtagagaaaacaggacaagtaacgatcaggaagaaagaattcacaattcctcacttaaccacaaattacaactaaaagtgcaaaaaaaaaaaaaaaagaaaagaaaagaaaagaaaagcccttacactcaaatgcatttccaaaattaaactgcatgataacgacaataaaggccatttttacagcaccactcaagagccctaattccagaaaacacatcgatatgacatagtgtggcaacgaatgtttaggaagcaaagaaaatggttcgactactggacgccttcgatcagctcattcaaacacctttaaaatcaatcaaaaggcagagaactaggaagagaaaagaaaatatggacgaataaaggtgttgcgagcagaaaagattgagaaggaggtggaaggccagggctcccgagactaacctgtgccatcgctggcggacgccgagagggccggagatgagagtttaggccgcttggctgaaggcggccccggttccacgacattctcggccatttttaattctttcggagatacgggcgaggaaaaggagaatcctcgggaaatctcttcttcagcccggggtccccgcccggatcccgggggtgggcttagggggctccgccggcccccgaagggggtgggggaaagttcctttttctctccgccggatcgcggtggctgaagagggatgtggactcgatagaaaaggtaggggcaagtgcgaggggccgggcctgggcccaggcccggaggagggcacaggcacacaaatgcgccgagcgcgtccgctgcggcgaatccccgagaactcgcgactctagaggcgcagtccccgacccgccacggccggcccctgcccagccgaggtctctcggagctccgccgccgccatcagcttcttcctcctcggcgctgtcctcctccttctcatcgccacaaggaggcgggggcgaaaagcggggagaggaggaggcgacaagagacactcacctcctcccggtgccccctcccgg

SEQ ID NO: 231 - DNA, 198317 bp, Hippotragus leucophaeus
  source 1..198317: mol_type = genomic DNA
atgaatgttcttcatgtagatgactaagcatcagttgtcaattatgcttgtgactgctagaaacccaagcagctctgcaggtcttcagctaaaatgaaccagcctcgatttcagcctcattttacctgctttccaatgtctcagtattagaggccattattgcagacattcttagagttcttttttttctccagaaagtattgtatttgtatgcatcacttttagcccttttcttttcacgtagttaaagtcatttaaaaaattctttctttatacgcttattgtgggaggtattggcagctgttaagatgattagttttttccccttcagatatggttctgacattcttttttaccttgataaagtttgacattagttacactggggttgtggatgctgccagaaaaagtcgtcagtgaactgcaagggtccataaaaggtgcttgttaatattcttaatcatcttcagttcagtcttttcctgaatgcctgaagtttctcaaaatccagtgctcgccaaatttccaattggtttggcctgtgcgaggagttggtatgattgcaccgtgcgtagagactctcttatttctaggttaagttccatcagtttgtagttggcttctgacatgtccaggtcagagcctatgactgcaaagcttcccgtctggcccagcgtctggtggtggaaatagatgtgtaacagcgtctggacaggggcgtcttcacagctgccaaagatgtcattgggccagagagatctgaaagcacacagtatttgtaagtcctgagagtcacagcaatcattccagattaagtacttttaggttaatacttaacaaaaaaagtaatttccttatgaatcactgaggatctgttttaacattttaacaaatactactgaaagtagcacagagaatgaacaaagtctaaaattggtgtcattgcattgataagtgtacaaaataaggtcatgttttcctttcacaaagattgagacatcaagttgaaaacccaaactccatcataaatttccagttaggtataaaggcatcccctataaatcccttcacattttacctgaaagctttgacttgtgctacagctgatataaattccttatttttcaaagtttcaattaaagaatgaatggcagtttctatagtagtttgtgcagctttggaaatgtcaatttcttcgttttctgaggcagactcggcttctttgaggatactttccaactgggcaagttcctctgacatgttgaagacctaaaagaaataaatataccttaaaaggatcaaatttgtacattcagtaacaatactgagtacttagctgtgaaattacatctgatgatggtaatattttctcttcagagattcagttgttaaacttaggacagttcatatttcaaattctctattcagctggaataatttcagctgccaaagaatagtctttagatactcttgataaaacaacaggttatcttaagtgtaataaatgttattaatacattgtaataagtaaaacaataggttgtttatactggtctatattttatacatacttcatcttggatagtaaaaatacatttatattattattttgtaacaaaagccctgggattctgggaggatcatgaaaaaaaattaacagtaatgagatgtctttatattttaaagggctatttctccaaggtattttatataaaccggtatgtatgtttttttttttttttcaagtaaatttagaaaatgcagtgatttccttggtgatagttctggtaccagtggttagcaagagggaaagattctaaagcgcctacctttgaatctgttcatgctatgatttctaatactcgcagtgttcttgacgtgtttattcttgtgtgagttactagaactatagaaatactacatggacaagatgttagggggtttcataatacaattttgtctttattatattgatgtgcttcacttgatttttgattacagatgatctattgctgctattgcaaactttaaggtctcaaaccttttaagatcgttggatatctgcttttagatttactaactggtcctaaactagcacatcatttcaaaaactgataatacttaactatggggggaaaaaagacccactagccactctccataagtgactttcgaccttagcactcctgcaagcaaataagtatcaatgtattttaattttgtacgatcagttactaatgcctagtacaagtgaatatttacctctgcttcattttttattgtgttgacttggttgataagtttacagtacgcttggaacagaagcagcagttgaaaatgcaatttgtataaccttcgacagagctccagttcctagaaataaataacaccatgttaaatttaggtgttatttttcatatttgacgagacaacaaagttccaataaaagtttataagtaaataattattttaaattgttctgagatttatctttctgcagtaagcaagttaatatggtatgaagttgacgaaacagatgaaagatgctctgaagactgggattaaaataaaaattttaagattattggttacatagttcatttttagtgtgatacattttcacattagacaaacagaattttttagcaggcaataaatagaatgctttaaaaaggattcactagaacttaaaacttcataatgaaaataatttacacattcatatactcttgctacattgagatatatatctcattgcatttatcaacaagtgcttgataaagcaaaaagtaaaactggataacctctcatctaaaaagtaagaataatttactttttaaattaattcctttttctaaaaaaaaaaattttataatctcactgaaacaagacaaattaaaaaatgcacttggattattaaaattaagaaatttaaaaggagattcattagagatgtgtaaaaaggcaactgctggttgtacatattaattataaaacctcattatctctgtaggactaaaacatttcatggattagggctatgcagaactaaagcacacactactcttaaagcagtccatgataaaacattgctaggtcacaaatggcaaatgaaaccagtttgtctgacatggataagtagtctataaattaagacaggtcacttactgctagaatttccatttgctaagcaagaaggtgatcgggtcacaaaaaatacaaaggaaaaaaaagaccaagaattagtgtaagaaatcattttaactagggtcacagatgtcccaggcaaactgaagaacatttaattacaccccaaagaaaaattcatgatgccatttccagaataaagttttttagacatttctataacaatccagggtgtttttcactctttgccaaataacagctaaattacatttaggctaaagtttatttcttatgcaaaagctacaaagaataaaatcaaactagtgggatgttgggaagttggctactgaaagtggtcatctatctgggtttttatagccttaaaaaaagctaaatgtaacaaatttctgttaggaaagtggaaaacttccaattacagtaagaaatgagttattcctacttctcagaagaaaactggcatataattttatataataggtatctgcccatgagaatattacctctgacatggctccactcgttctggctttcttaccctttgctgtctacttaaatcataagttaccataattagcactgaatcagaaggtaaaatattgagagcagttgtgtgttttaaattgcatttcaaatgaagtttactaaacctcagaaatttaacccaagtaggtttgaatcaaacatccagcttatggaatatttaaaaattattacatgaaaatatctacagcaacttagacctggtctcattaaaggagaataattacttctaattaaaacagcagtcatcatatgtaaatattgcttttgaaatattcagaagtcccttttgaaatctgcttttctaaatagtttcctctgaagcactgtttatataacatttattgctatcaatttagaagggatttgctaagcataggtgaactttagctctgaactacttaccataaattacgtggatggtcattctgtgaatgttagttgagcacaatccaatgtcaaacattagcatatctaaatttctgaggttttacttcatatagttttgcatggaaactatgaattttaagtatattttcatttctattaacataaaactgactccatacacatatatccatagcatccactttaggatgtaatggaagagatatcactgataaagtttataataatcacaattataggaaataaacataattaatttcttagttttgaattactagatcacacaaaatgttaacactgtacctttaaaaatattgctttttagtatgctgaaatttgcatatacacaatcctttcatttatctttaataaatatttattgagtgcttattaggcaaatggctatactggtatataggaacagacagtacataatgttgcataaaaagagacctctcctttcaaggagctgaatgtgaaaggagagctaagatataaatggaaggcttaaatgtaaagagttttcactttttactcagtagagaacctcaacctattttaattgacatagacttctgagatggaactccttgtcatcaggtagaagggatacaagaaatacttagtctaaccatctaatttatgtatgagaaaagcagtctgttccttgtttaagccatagtggcaaagacagaaccaaaggatctaattctagtctgagattaatcccttatcttgccctgtttctttctttacacagatgacataacaatttctttatgacagaccaggatttggagtcagcctttctaggtttgactcttaatcctatttacttactgattttagataaattagcttctttgagcctcaattttaatttgcatatatattttctccttatttaaaaatatttattgatagcttattatttatccttatctcataatggggataattatagcatctactagatgaaattgtatgggtagaaataatgaatatgaaatgctcagcacaatgcctggctaacagttaacatttaatgagcgtatactgctattttctcaatatttcagttttgtaaaacttcaaatttttattacagtactacagtaacttttatgacagtctgacattgtaaaagattagaattctgatgtcaaatgcagaggctattagttgattaacgcatgctccccctataaagttacacttctattaaaataattggtaggtcttaattttatcctcatttaatatatgtgttatatatgtgcactcttctctatattactatttttttcactgaattttactaacaaaacccataacttatccaaccagaatttcatctttggaaggactaacatgaatgtattactccagtttgctttcttgaccaatttatctgtagaatactaatgcagaatgaaaaaatttttaaagaggcagacgcaactaaaagtcaacctggactatccagatattcatcgaatttatctattgaatgttattaagtttcagtcacaagctggtcgttcatttttattaaagtgaggttttcattactaagccaacattccactgaacctaacatttacaaagactgttctgataacaaaaatgaaaaatgttacaaatactctttatttttaggaatagcaaataagaacatttgagcatatacattattttacctgataagaaatatagcaaaactgagaataagaaacttacttgtgcatctgtgtttatcctatacatgtcgtctttggcaccaaatgtcctcttacaattgtctaaccactgaagaaataagtaacagtaaaattttaatacagtaattgcatagtacacaatgaaactggtactataacagcctgcacatacagaacaaaaatcttaaaaagtgaacttgaatttctaggattggttgtagacacaggctttgatctccacttgagcagaatcatttgtatgcaacaaacccaagcagaggatgctgtctacgtggcaacgtgtacacactggggacagtttattaatggaaacacaatcagctgtcttctattccagggacttgtggtgctccatttcagtaacgaatactcatttctgtagattttactggaaatcttcacagcctatgcttgacctgtgtctaatgtaagatggagaaatgaaaagtgggcttcccctcttgtcagtttaataaaggcaacttagaatcaaccaggtctgtttgtttttcagaagtgtaattctcagaagacgtgtgtcacttttaattagtgaaacagaaactcaaatccatttaaaatcttgtttttttttttcctttttggacagcaatgtatgaacaaatgtgttatctccaaagagatactggttgcagaagccaaatgtgattttccttatccaggggctagtcctaaagatggatattaatttaaggtaacttttccttggccagatataaagaacataatggtactgtggtttagtggggaaaaacactggactcacagaatttctaagctgaagtgaaagctaagagccttcaagctaagcacttaggttttgacagtttgatattaataatcaattcttttaccttcctggctcgctcttatgtgacagactaaacatgataaaattacaatataatattatcaaatatataatatgaattatatttgaaattatatgtatgaaactaggacatttttcattaggactctgagaaaaaccatgagctacattgtttattctttgaaaatatttcattattagacatttgaaattctcagttgtagcttaacggtctacatgcaaagaatgaaaattaggtgtctcggttgtttcaaaacagtctctttgaccttctgtccctttatcccggcccctcagcctggctgggcccttaggctctgtgcttgacagcaggtcagaagaaaaacatgttaaacttctgtagtgagatacagctcctggcagccactgtcaaaagccagtcagcagatttctctctatcagtaaaattcagctgacatctgtcatggaatttgtacatgaatgtccgctcacaaaaaatgttagaatgcctatatggttcatcatcatcatcacaagtctagcccaatgtgtccagtatgctgatgaaaaaaattaattgcttattcttactaaatatatatttttacactgtatgcctatgatatggcatgggggggcactattcaacataattctggtttgtattctgttacaagacaagccccaaccctattgtgctgtggctgcacactggcctgaaaagtacaggtccacaccttcctgttcagtgtattcaaaacacaatagacagtctgggtacagaataacctccagttcacaggttaatcggtcttcctatcatggattttttttttttaaaactcagggctcaaatattaaaaattaactggagaggtttggcgtctgggtatgatggagtagcttatgtaaggcctgtcctcgaaggataactatggaacttgagtaagaactagttggaaaagaactaggaagtcaaaagaactgataatattagtaaatatcaaactgtcatatttagggacttaaataaaagtatcaagagaggcctactttgattccagcgttactataggggatttactcattcctgtccatgggctcagaagctgaagtagtggcctacagtttcactgggctgggaaagcagggctgtcacaggtagtgaggccctaaggatcaagatcctggagaagggggagctgcagaggaggcagcccagcagtccgtgtgcactctccccttggcgcgttcgttcctgtgtttatcatgtgcaggagaggctaagaaagccagcagtggcctctgggaggctgaaaaggtaaacagaggctttttggtcttatggtgctggggagacaaaaactgttcgcttccagcccagagagcgggtcctgatgaataccccaggctttcacttgtgattcttagaagcctcaaggaatatacaagaatgtattgatacaactaaaaaactattcagttcagtcgctcagtcgtgtccgactctttgtgaccccatgaatcgcagcacgccaggcctccctgtccatcaccaactcccggagctcactcaaattcacatccattgagtcggtgatgcattccggccaaaaaactattagatgggcaaaaactgaataatgaaaaatagttgtttgatagaaaagaagaaaggaagcaaagggagggataggataaaaaatagtgacatgattgcttatgaaggaatcaaattcatttttctcttccatacaagtataattgattcagcacaattttctgaaacgaacattcttgtcccactatattgcaacagtacctctgttgtaaattatgacttggtcttactggctgtaggtcagaagtgacctcttcttggaaatcatagatttgggttgcatccattctctgttagatctacacgactttgggaagtctctttaattgccagtacttttatttatactataatccctactttggttactaattatttgttactaattatttacataaagcacaaagacttctattactaaatattcctatctagaatatttaaagaataagaacctggttttacatttcattcttcataggcctttacatgtgatagatatttagtacttactaaagatagatcggcctcctagggaaaaaatacctgtctgcagtttgtgtgtaaacgagaaccatttttttcctttaagtttttctgcccctgccagttgaaaacagcatactggatttgccctcagggaccagaactgctggctgtgttttgcagggccagactggagttagagaaacgtttgcaggcagtatctataatctactacatgctcctttctcccttcgcttgcccctgtacacatacacatcacaggaaaaagatcaccagttcatcacaagtggcgggctttctggaccacaattatcatatgcattgctcagggaaatactgcttttatattcctacttgcagtgttgacagcagctatacagtctccagacagaagctttttataaagcgaattttccattgtgttctaagactcttagaaggccagtttctaaaagctgaagataggaattaactggacaggcagctccaagttccccaccattctcagcataaccctgaggcaggtagtaagaggtcctgtttccctctcggctattctgccaggttagcatgtctagtgtcacaagtaactacttttttttttttacattgtaaaaagggactgacctgctcagctgcttcttttttggcattgtaagtatccaggtgttcctgcagctccaaaacactgaactttaatggttctagcaaatcacaggacatcagctgtcaaatcagaaacacattgatccagatcaccatttctgatcacaatcctgagaccaaaacctttgggttatgggttagtgaattttcaagccaagttaagccagctcccctactgccaactgtcctgtagtaaggactgacctttcactgaaacagaggaatgtggtgtggtttgaggaatatcagaaaggataagcatgccttctaatgctttcaaaacctggctcaggcaaaagtggcatgtcccaccagggtataccttaacagtaatacacttgaagctttttaaaccgtaattctttaactatcttaatacataatctacaaatgtgcttggagacaagtggagaagaccaggaagttctgggttcttcatggtggtggtagggtggggggggagaggggtggtggaaatgtgtctagccctctcctatgagctttgattcaggaaccagggaaaagtacgcatctctaagcatgattccttagcttttccatccacgactctctgaaaggtgagggcaggatgaggtcagaatcagaaacagtcacaagtcactgcatctagtacatgggaactatattttgctagatatttataatcaagttgaaaatatgaacctttagattttaaaattctgaattacctttaaaaaagaccatttactgagtgatgccattccaatttactttttatgataaagtaagcctcatgtaaaaacttactgtttcagcatctacaaagactgttgggcattctgaacacatcatcatcacttccaatgagcttttaaatttggcaccaatgcgctgcagactcccaccaagaaagctgactgcctcattagttatgtccccaaactttctttgaattgactgtggagaaaatataagaaaatgtatttcatatgaaagcctttcttaatctttaagtaaaaaagcataatttataatgagagcaaccttctattttaaaactatgattgtagtgatatatacagaaccctaaaaatcaatctataaacccttatttttaggcacttctttaggaaacatgataatttctaaaaaaacgatcaaagatttattgtatagtattcctgaaaaaggaaactaatgatacatgctgttcgtctccccattcctaagatttttttcattaggaaagagaggagtatgtgatagatattgcaggaaataaagccctcacatgcacgaggaattagagcttccaaagttaaattctaccaaatgaaactttcagtaaaagtagtttactctcctcggatatgtttatccaaggagataaactatctacttggaaagtttactctcctgctgacttgaactgaagtcatcaaaatgcaccaagggcagtatcttctcaaaactcaagaacgttccttcacacagaaccatcaaggcctaaaccaccgtgagcacggaatgaatcagatgctatgccaacaacgtaatcactctacagatacttggatctgtgcctacatgtgcgtgtgtagcaccgtttggtgccattatgagagatttgaaacaaagtataagccacagtctcatgcatggagaaatctgtgtctctggaaagaaaagaatataaatagaaaaccaagtagcaatgcaaaactacaaagttaaataagtgctccagttaataagcactgaagaactttcaggagagaaagactgaaggctgggaaaacttcagtgagattatgtaccgagttgggtcttctaagatgtgcaaaatttttgcttaggtggggtggaaaggtggcaggtagttgggaaaataatgacttaaatgtcagccttggtttccctagctacagaatgctaaaagtacattacataggtctgttgtaagaattacttgctgtaaaacatttagcctagtgccttacatgtagtgagtactgaataaatgttagctcatactactttcagggatggaagcatacttggttaaaaatgttaaggtccccacacagtaatgaaagtgccaatgaattgaacactttatgacagattgtcttatgatagtgactgaaagctccttaaaggcaggaaccctcctttatatttctttggtgtccccgaaggtgcctagcatattccagaatttgatcaaatgttatttggaagttttactctaattaccttaggggaagtatccgtactagtcactgtataatgtcgtagcagtgctacaatgtcaaagtgtaaatttaaattatcactatcttaggaaaataaaaaaaaaacttcaaagaaaactagtgagaatattaaaatttgagatactgattttagataaaaccccgtaactttatcagataaccgtaatacgaattcagaagtctccaaccttactgacctgaaacagcctagaaaacacgtgaaaagtaaacactgcacaggacccgtcggtgtcagacagcatctgattcacgtggcagcgccaggcttcctcctcatcatcatatgctactggctggaaagcggctatgatggcagagagaaacggtgatggcagaggtgatgtctgcacttctggaaaaccatcttgttcttcttcatcttgactgttaacacatacatagtcatcataatattatcttaaaagaatacactcaattatttaaaatacattaagtcatctaacattatttcttacatatgtacacatactgattcagaaaatgggcgaccacctaaattttgtgagcaagcatgaataagcagattctcaccctgttctttgtagcatcttgttctttcttagcatctttggatttagaaatctaatttcacacaaccaccttaaaacaatcctacagtagggcttcccaggtggctcaatgggtaaagaatccacctgaaatgcaggagacgcagaagatgtgggctcaatccctgggtcaggaagatcccctggaggagcgcatggcaacccagtccaatattcttgcttgaagactcccatggacagaggagtctggcaggctacattccatggggttgcaaagagtcagacatgtctgaagtgattgagcaatcctacaatatgccagggctatggaataatttcagtaccttctatgactaatacagactagaatgacttcattttaaatggtcaatttcagaggctttttatttgaacaggctcaaattggcaatcatgatattttcaaagtttttgtcatgtacttttgtgtcaagggctatatattaggtgccttacatgggctgttttcattcaatcttcacagaaactctatgagagttaagtactattattatcctgacttttaccagtgaaggacaaaaagttcagtgaggttaaatgatgtgcctaggctgctgggtaggaaatgacagagccagaatctgaggccagttctatgggaccaaacccagtattataaagccatgaggcatgctatgtgcctagcagtgtggcactaacagatctgactcaaagagacagaagatctggcctttttttctttttttgaggaatctataatccccacagtcagataatatatacacacaaacataagacaatgaaaaaaaaagggagggatatatggtatttgggttgagcatcccataaagaaacgtgtgaccctgggtcttaaagaggtgtttggagtcagactccagaaagaaatgtgttactcaaggtcttaaaattgtatatttcacattacaggcctccacaagaccattcagaaattatggagcaattcatctagaagagagggatctgaaaagactggggagaaaaggtcaaaaggaagcagacatttgaagtgaaaacttaaattctacctcaaaatttaatttttaagatgtcactgtggtgattgattttaagaaaacgtatcctgtaaccttgagcagatacacctctgtatttactaaggatgctctacttattgtttcatcttttgtacttggccaaagtcaactctcttgtctgcagccttttagaaagccagatatctgagtatcattcctgcgtcattcctgacgtctctgaatttgtgtatgatcaatgagtgagtgagtacatatgtcagagccaagtcagtgacatgaacaacatgtgtcaccaggatcccttgttaatatctgagtgtacactttcaaatacaggggagcattctagatacactgagaatgaaacacctccttatgtgctgtatacgttaaaacacttatcacttgaagtataaataaaaaagctttaattgtaggagtaaaactctgatatacttgatcattaaattttatatgagcttcaaactgttgaatagggaaatagatacactgacagataatgcattaaaattagatgcctttataaagaacattattttgagccacaaatgtttataaaattaaaaaatataaaaacaaaacattaggtaatagattacatcataattctcatcactgaaggactattttgtgtttaagtgacatgagtgacataagccaccagaatttcctttaagaactttatgtaataattcatcattcaattctgtctggtaaagaatccgcctgtaatgtggcagacctgggtttgatccctgggttgggaagattccctggaaaagggaaaggctacccacttcagtattttggcctggagaattccatggactttataatccatatggtcacaaagagtcggacatgactgagcaactttcacaattccgtcagcccgtgattagaaaaaagtcctctgtgagatttcttcatactttgtggtaattttgaatgtatgatgcataaacatttaaaaagtgcactctaacatttgacggtactaagaaatgatacttctgcccattatataagtcaaactttataactattagtaataagactataatttttggaatgtatttcagatttgttttggtatcacagaagttccttccataattttgatacttgggtccacccacggcccaatatggattttagcacgtgggcacttggcattctgcccaaataggtatttggtgtacttctaaatgtagactcactgtgctctgagaatggcctatttgtttttctttaagtgaacagcaataacagagagtaaaaccatggcaggaactcattttacctttaaaatgtacacagaaatgaaagtcggtttactggaacagagggtcgtgttcgggaggggacagggtagaagcatcacctcatcgccgtgtctgcgacactgtactctcacctcgacagccccgagaagtctgcttcctcctcctcgcatcgctcgtctagttccttcagagctaaggtgacgtcttcctcacagaccgacccggggtagctctcaggacctggaggctctggcaggtctgtctcctctagatccagaatcccttgacacacgagagagtcctgctgttcttgaataatatacgacccatcatcttcaaaggcggtaagaacctgttcttcctttaatactgaacttgtatcctgaaaaacaattgtattttttttttttacaaacttttaaaacattaaaaagcaaattttaccaacacagaataaatgactgttgccaccaatctacatttattttattaggcagtcttcatttacacagtttgattttgggagtttttggactctgatcacataaaattgttttttttttttttttttttaatagtttccagtttaaaaccctttgaaattaaagtgtatcactgactgccacacagaaacatcaaggagatctttcttcaataggactcagctgtttacttagaaatatatcctttggggaaatatcttctctcccacatattctaattctccataggtagagctttatattaccactataaattctctcttatggaaatgtcatttctttcattatgctagaacttactctctagcgaattctagatataagaaggggaggtaattcagaatgcttaacccgttggttctgcggggctacctgtgaatcacgatcaggtcttgaccagtcaggacgctgttgaacagaaacgacgagggcagcctgactggcgtaactgagctgaatacctgggatgtatgatttgctttcaggtaataaggttataataatttatttagatttgagtactgggacatcttcaccactgagttaagaaaatgctggaaaattttagactgttgtactcttgagaattaaatgaactataaactcacttatcaatgagggacatgataacggaaagcatgttgtggcattttttgctctatccattgtaacgttactgaaataatgttgatatatgtgcctggcatggagtaaaagttcaacaggtgttggctgaataaacgagctaccactactgaaaaagaaaaatacttccagggtctagatcatgacatcggcaccagttttaattcacatggacattggttccatcagtttgaaaataagcactaatggtctttcagtttctttcaggacttagacctaaggttactattgagtcaaacagcagtttctcacctctttgtcacagatgaaaatagaattttcccttccaaattatgaaaagtaagtgaaatccagcgcccctgatcttagaccagcctgggctttagttttgttgtttagtcacccagtcgtgtctgactctttttcgaccccatagactgtggccctctaggcccctctgtccatgggattcttcaggctactggattgggttgccgtttcctcctccaggggatcttcccaacccagggattaaacccatctcttcgcatctcctgtattacaggtggattctttaccattgagccactggggaaggccgggtcttaatttactcacctgtaaattcatgtataacatgaaggactctgggctgagtgctctgggataaattagtaactaactacaattagtgtgcaaactaatacggggctaattatgcaaaccacaataatatacagtagagtatcgtaagtgtaaggaatgacaaagatggggtagcaatagtgcaataaatgtttctgtcccctcaaaattcatatgcagaaaccctaagctccaatcccctcaaaattcatatgcagaaaccctaagccccagtcgggtggtatcagaagtggggaccttgggaggtgattaggtcatgagggtagaactctcatgaatgagatcaggcccttaaaagaagaggataaagagctattctgttctttcccaccatgtcagaacaaagcaagaagagctcccaggaagagagcctgcaccagacagcagttggctggcaccttgatcttggagtttctggcctccagaactgtgggaaatgcatttctattgttgataagcccctcccaccccaggtgatggtatttttgttacagcagccaaagctaagacagatgggaaaaggacctgcacgaagtgtactaaggaaacacctggtctggaatagttatgcagaaaagtacaaactctgagtcttcacaggatggtactttataaataatatggtctaatcattccttatttgctgcaatagtttatattcaatacactctatttaaggtttccatctgaatttttttcttaaagatttggccattaaacaactaagaattagttacttggaaagatactgtgagtaatagtgccagagacactgctacacctagaattttcattggtattaatttttccttgggcatcagtttaaacatatcgtactgaaatgatgcaccaccaaatttcttggtttaatgccattacttttcattggtgcatacctgtgttttattgttatttgttcttgaataataatttgaaaatacatgtttcatctaaaattataatgtatgctgaaattctctagtaactcctaggtttcatgaagagagaactttttggctaatggaatgaattccactattatatgtaaatgctgagaatcaaattttcttgaacattaccttattgcacagtgactcctctgtctctctgcctcacacacacaaacacacactgtcaaagtttcattttgtataaggaataatttctggcacgcatgaattggtatctaaactactataaatattagaagaaatccctctgtggaggttcttctgataaacacaaggatgtaatcccttctagaaggaattagccaagtaagaatattggagtgggttgccattcccttctccaggggatcctcgcaacctggggatcaaacctgggtctcccggatcacaggcgggcaacctgagcttttaagttttctgtcttgaggtagaatgctttagcttattatggcgtcctaatattacacaattcaagggcagaaattcaaataaacatttctaggaatttttttctttagttcataaaatatttcatccagtgaagttaactgctttcctcatcttaagaaattgctttatagcgatatgtatagtatctgtaactcacaacattatataatagggttatggttttatttattagtgcttttatactttctttaaaggggcaattttgggttacgtgacactatttgtcacaccaggaaaaacaaactaggccaacatatccaacagatacaaacctgaatcattctcttgtggacaactgttcttctggtgaatttttatgtcaacagaattatttttaaatgaaatagtatgtttcaaaaaatatccccattctcctctgtcagtgttacaaagtttatagtgataagggaacacactattgtaaaaggaaaaaacatagtaaattttaaaagtgtttttccttcatttaaaaaaaagtgtccttgggaacttgatagtgtgttggaagtaggcccattagatactgttggatatatgaatgactcatctgaaataacacaatttccagtatgtatgggaatacatatgaatttccaattcatttccaatcaatatgaatgacttccaggaggtagcttacttactatgaatacagctattttaataaccaaaactaaaagattttcctgtttgttaactatttgtatagttaaaacacaggaccattaaccatatcgcttttgttaaaaagctattttccattgtttctaatgagaatgtctgctgacttataacatgctacgagctatcctggacacaacagatcagatgatcaatgagtagctaacgctcacgtgacagccttcccatactgaaagaatacagtctacttcaggtgcagttctgaagtctgctcccttcataaacaccttcctgtccacgcactctgtcacttaaggctccttatctcctcctaatatgctgctggtgtgtctcttcatctccgccttctccaaccctccctccacacctctgtaagagactttactaaaacacaggtcaaactgtaaccttgcccgatgacggactgcaagctccatggaggaggtacaggtacgagaacacactttcacttttccacaaaaaagccgagattgaaaaaaataaacatgatcagattatgccctttgggcttaaaatcctctagttgttgcccgctgtgtggcctctaagatcacccttgtgagcacctggccccctccagctccttctctcccaatgccactctctcaggttccctgcactccagctccacaggctgacattttagctcttcagatacctgggggccttttccactcctgtttcctgggccccgaactcccttcctccacacttacaatgactggctccttctcatcacttgtttccaccagatgctaccctcaccaaatccatattctcgttagattttcttaatatgggtagaaaagggataactttctgatatatcattgatattttatgtttttacctgtttactatgtctcctgctcaaatgaagctccataaaccagaagcctttgtctgttccacacggcactgtgtgcccagggctaggacagagcctggcacatggcggggctcagtaaacaaatatgcttaaatgactgagtgcttgggtgccctgggtattcccacccaggtatctgggacagggcctggcacacaattggcatctttggaaagaatgaagattcatgacttcctatcgtttcaaataaagcctgcccttagtggaacccagcgtgtcttagatccatccatctttcctcctgccgctgctgctcctcctcttctctagagtgattcctgctgctgcctgcacattccatgttatttcacatggctgtgtctttctatgccatgtccctctgcctgcagtgtctcaaatgccacaaagcccgttcttcgccacgtaacccctaatgcacagctgattggttctcactctgagttttcacaaagccttgagcatgtctgtttctgagtttctcatactgacctgcagtgcttttttttttaaaaaaccttctgtctcccttaatagccagtggacactctgaagacaaggtcatgctttactcatcttttcagcacctaatggaatgcccagcatctagtaaatctcaatgaatatttgttgagttatctaagcttcagccatagtaatatgaacatttaaaaaagctaccccccaaaagccttcatttcaaaatacatctgcttactgtaaagatgtatgatacactgttggtgtaataagaacatgagatttctccttactcagacaataatatctaataattagactggtcttgctctgataactatattaatttggttaacactgaaaaaaagtgtagtattttcctgataccagggcatacataacagcacatatgaaagagctatagcaattacagttttttaaagagatatctacagtagtcttaaaaaggcaactaagaaaacgaatactcacttatttttggtcattagcttggaatctggcttacttctcacaggcctttccaaaaaacataacactggtagttccacagtccttctaaaaggtttcatttaaccaattgctaacacagctggcctgaggttttcatcccaattacagcaccaatcacaaaaaaacaaacaaacaaaaaaaaacccaaatacaaagcaaaaagagaagaaaaaaacaaaagcggtccttcagcacccgagaagatgctcccatccccggagaagcgccggtacattaacctaatcacgttctgcagcaggagatgctcattaaaaacacttagggttatttttaacctgtaggtcatttccttaatccatcactttttttttcttcagtgatcagatttgactattggactaaatcacttaaccaacaggttagaaatactgcaaacaaatcaaataattagcgtatcagatgaaaactcctttgaaagaaaagcaaggggtatcacagattgctaaaaagagcccagattggccatgcaccagcccccgtgactccccacctcaggcagctggctgttagccttatctagagaagcttccaaactgggggtctcatctctgatttgcagaacttctgtggagaggctgccagtggaatcttgagactgaagaagtaaatcagaatggtcctgcagggtttcgtctgcagcagaatcgttatttaactgaaaggagagacagtaaaataaggaaatttatttaggagttggcgatggtcactaaggctacaagaaacctgtgtcataagatattctgaggccatagttataaagagcttctttgacttcctaaaaccacctttcccccttatttcagtctgtatcagaattggtgcaattaatgcaggcagctagttcatcagtagaaattaagtctccattaacacggattaaattttgctgaatagaaaccaccaaaatggaagagctctatgtgactatgttaatcttcatctaaaattcttatttttatggtaatgtcttatgttttcagttggcctaaggattcgcgaatgcatgggctttttttgccttcctgtggctttggcaccaagcactcagtggattcttaagaagcagtgttaactggaggcaggtgcttaagaatgaactggccattaacttactgaggcactaatcaataccacagaacttcaataagacaaaaagaggacaatgaagctgaaatggcaggccagcattagtgggtttatgttctttgaaaactagcagtaatcaattagaacaaagaaaacactacaatttttcttttaagcagggctatacatttttcatggatcaatatttaacataagaaaaatcaagctcacgatttcgagtagataaaagcagaagctaattttttacccctatgaggaggaagtagcttcaaattctttttcaatttcactaccactataacagggcttccctggtgctgctagtaaggaacacgcctgccagtgcaggagacataagagatgcaggttctatccctgggtcagaaaaatcccctggagaagggcatggcaacccagtccatggaaaatcccatggacagaggagccaggtgggtgacagtccacgtgatcgcaaagagtcggacatgactgaagtgacttagcgtgcatgcataccactatgactaaggtcggccttatgaagagacagttctgccccaaggctctcatggaagctaacctttgttcagcacttactatacttgacttccccatgaaatccccccgaggcaggtgctgccaggagtcctgttttaaaggataggtaaagataggtaatgatcacagttacacagtggcacgatgctagtctctgagcctccggtctgacccccattcagtgagtcactgctgccagcaactcactgttcctttaaatgcacacagtcctggggaggagcaagccttaggtggcatccagactgccctgctcaaatgcacttataggctgtgtgtcctgggacaagtcacttagtctacagagctgcaatcagtgtgcttaccttgtgtagttgaggggagaggtatagtgactaatccacgtaaaacaccgtgaccagggcctggtgtatctccaacactcagcaagtggtaactactgctactgtgtcagcaacagcttatcacttaatacgtgacagggagttagggaaagacatattggcataatggtgagatgccaaaacagggcaggtgacaagaagcctgccacaaaccgaaatgtacgtgttgtctaaagcccagctcagcctggccattcaacagcactaccagcactttaccagcagactgagtgtgtgcaaatgggccaaattaaacaggggcgatgaaaaaaggccctcatataagagcgctgtaactgtggctgccacctggtcttcaccagctgattcctcatcacatgggccatggtggctaattcacaccttgctctctccttgttctgccatcttcaagttccaacctactgccactgcaagttcagcattcccctcactcaatattcggaacagacagaccatgcttatagccttcattttctcgtctctctctctctgaatctctgccattcaccgctggaatgtaagtcagaacctccatataactgacttgatcttgcaaagggagcaaagtcgtgctctctctttccacactgacaaggaagaaacgcaggtggagaattaagcagtgctggtgtttgcactgataccaaaacgtatcattcagggtgaaggcctcgaaaagtgcccagcacagctcactgtgactaggagaaaaacaacagaaaatatgtctcatcagctcagaggtgctgtctgtgctcaatcgtgtctgactctgtgaccccatagtctatagcccaccagggtcctctgtccatggaatgttccaggccagaatactggagtgggttgccactgccccctccaggagatcttcccgacctgggggtcaaacccgagtctcttgcatctcctgcattggcaggtggattcttttaccactgtgccacttggaaagcccaagcggtgcacagatcaaatgtttagttcccatcatgaataatggaacactctattgctgctagagcgttgtgttttcatttcagcatgtgcattttacccacagtgaaatgaaaatcagaatatcgagcaatggtaattactaagtgggaagtgaagacaaagaggagaccagctgtcactgcacaaaaagctaagtgtaccatctgcgtgcgtgagagtatctggcttgccgtgagcgccgcttcctcttccgaggactcgtctgtgtcctcctggtttgtcaggttcaggctgggggtgctgctggagcactggtactcctggagagacggcgtgtcccctttgtcaatgctgtccagtgagcgcctgcggactccccagttgaagttgtccatactttcaccctggaaaagcaaggcctcatttctaagactcaaacacaagcttataaatatagggaaggtaatacactaggagaacatatacccggatgaaaaatactcagtgtatcgtcataagcagagattcaatcagcccttcaattttttgaaacttttaaaacatcactcaatattaaaatatttaaagagatcaaagtatgtggtcgatgacctgttttaactaaataggattctcttgactttctatctagtggggaccaactaaatcaactacctaggccatttctactctaatacacaaacacaaatgagaccacaaagaagacaaatacattcacagatgacaacaaataaataatccagaacgccaggctgcaacttacctgcagctcctggatagcaaaaaggaaaacacacagaattagaaagaacgaagacacacgtgtaaatatacactacacttgtggggaaaaaatgcttggtgatttctcaaacccaaagactgattcaagctctggatgaagctttgtgcaggaagtcaacacgtgattcacattatttttttatgcagaatatatcgtggaaaaagagacagacacttaaaacaacatttctatgatacactctggcaacacaaacttcaggaaatctttaaaatttacatagatttaatactggatacaatgcaaaaccgacttaaaatatccacattcagttgacaacatacaggttcaacaattattttagactgtagcgtggttctagctaaatacagtggtaattttttgctaaagaggagtttaaaatcaagatcacagttatcaaaacataacctaggtcaacttaaaaaggtcaataggaaataagcaagtttctgctttgccccacttatggatttatctaagttatgtttctgttattccaagctgatcctcctttgataaggatataattcttatactctttcttaagctctaatgacaaattacagtgagctggctaacaaaatctgacttatgtatattcctttatcaagagggattgtcaaggatagaggttttcagatcttttttttcttaaataaagcagaggaatactcatttcaaatgaaacatacaatggaaatcaactgtgcaaaagtgataaaaccggggctgtggcaacagccctcaatatgcatttagtgaatgaatgaatacttgctgtgggctttcaaggctggggaatattttagaagtttcattagcagttaagtttattttgtagcaaagtatttactgttaccatgtccaaagcaagactaggtttttagaaaatctcttatcatttgatttggcctaattatgagacctaagttagtatcacctcaaattactgtgacttaaataaaagacaaaagcatttttaattcattctagggttctattcaaaagccatatttattactaggaacatttcagagtactagataaacttgaaagcaattataatgatttaaaaaaaaaaaaaaaaaaggcaaacagaaagaacctgaccattacaaaaacataacagcctacctttagagcttctaagctctgaactgaaaaaagcaaataactgcaaaagacttcagaactggcttatgcctgtgagggcataaggtctcttgaactcacacttccttgcctaactgtgtaggtttttcctagttcctataactttcaatgttttttaaattgtgggagtgacagcagttttggagggtgatgacctgctctttttggaaaaaaaaaaaaactgaatagaaaatattagtgtacttagagtaagggtgcatattctttaaacttttaaaggtgtgtctactgagatgtgatatgtgatgtattcgcaatggctatagttttttaaaaaaggctaaaagccactgccctatgacactgaataatacgtgttcctgggctccgagaacctgtccagctgcgtctgggaatacgcacgtggtgaacagtggccacccctgagccagtgtgagggcatctgctggaccctgaggcaccatggtcatatcctcacatcctcggggtggtgggggagaggaagggagtggtattagctgaagcatacaggaagacctccatacactggtttcctctcaaaagtaatggtgtaacgtggtggaagccgtacagttcactcctccacctcatctatttgagtcaaaggaaacatcccttcaaagaggactgatggatgcgcagaagttatacgagtgacttgaacatccttggacagaggtatagcatgacatggtgtggatacctgacagtaaggcgtttggagctcttgaagacagacatttataacaattttaggaggaacatttctgtgatctgtttgaggtacacgtttcagatttaggagtttgtggcttacgggactaatgtcagctatgggaataggtcccgaacagcctgacacaaccagcgtgatgggcaagcctattgctcattgattttttttagagattggcaaatgtctcagtttgggccaaatgaggtgtgacaagaagtgtgctgaaaaccttaggagagttaacttcttcactttcctgagagcctttatggaagtgaccctcactttctctgaacactggcacgtatggacataaccaagatcatttgaggtgaagccaacttgcagagaaacgcagagcttagagaatgcaaagaaacagccaggaactccactgagctttgcctaacaagctctgactctgggctagcccagttctgtaagcaagtaaatttaccttttgagttggacattccacttaggaagcatctaaactgacacagctatcaaatttctctaaactgaataagttttaaggagcaagtccttggtattgaacgaaatgaagcatttgagagagatggctccaccctgaagaagaaagtggtaggtaatgtcctgggtagaatctcagtcacagaaaagagttcgagagtgccaaagccatcttaatcgtcaatctggtttcagggctaccctcttcaaagctgtctgatagatttaaatgaaacttttactcttctgctgcacattaatttgtgtggcttatgcaaacacttaagtctaagcacgccctcaattaaaaaaatacttttgaaaaaaatccatttttactctatattttgaaagataaagtggaaaaaattagatgttccttttatttcagacttattctgctattgactaactgtactaatcatctttagttcccaacttagatttgtaccttttgacgttacactgccccaaacaaggaaagattaaatccttatttaatcctgtggttaaatccttcattctcatgtagctgtacctattctataaatattgtgaaagcccatatccttacctctgcatcttccaactcaacatctaaaaagtcaaaatccttaaatacgccaaactgttgttcgctgctattatcttccacagctacttcttcctcttgaattatgtcgtctgttgcagaaatgaggctagtttgttggtcaccaacttccaaatcctcgttagaagaaaatacaacctgacgcccagccaaaaacaaaacaaaacaggccgtccattagctctgtcactccgaatatgggacaccagggccctaggagccactgcaggccccttctgtcagtgagctcagagctttaatttgggcaaatgtctaactatgtggatactgaattagcacagtggccaagcgtcacaaaggcaagtgacaattttttcattcttagtcaacaccgttaagaaaagacaaacaaggagacacaataatttctgtttcttcatggactaacacttctaagattttttaaaatccttacacaggttttcatgattactcaccgatggattctttggaaggccagactctggaccacagagagaaagcacattcattagcttttctcttgttcttcgctaaagagaaagaaaaaaatgcaaacgttaagattactaatgaaaataaggcaaattctcaagttctcataccataaaactgattcttctgttctatgaacttttatgcacctgtgataactgtggcctcttccaactaacaggcaccaaggcattagagttagaaccggaagaagtggaggaagtgcttcttgtcaccgcgatcactttgggcttcccattcctaccagctgcgctgtgctgatcaccatatttatttccaataattggtgtctacaaagaaataaattgccagtgtttgactcacacagttcaacataagtgggttaatagtgtatctgtgatgacattttttacaaacaataaaaaaaaaacagcgtaaaaagaaagattacttagcaaaggcagatactacaaaaatcaaaagtaacaatgatacttttttttattagtaagatctcactttattggaaacaagactctgaggagactgttggataacttattcctacgttaaaaatagatctctctgttgtctttaaaaaccaccgtctacatctttcccccaatgattataaaatatgtcctctttgaaagctcagaaataaaaaaatgattttacaaaatcaactgtcatctcaccactcatatttaatgttggataacagtttggtcagactttcctagtagctcagacggtatagagtttgcctgcagtgcaggagacctgggtttgatccctgggttgggaagaacccctggagaaggaaatggcaacccactccagtattcttgcctgggaaatcccatggacagaggagccttgcaggctacagtccatgggggcacagagttggacacgactgagcaactaacacgcacaatattttgtgggtttttttatgtaattgttaagtacgtgtctaaaagtgctttcgcaaatattcaagataagtaacaactgcaaagtgaaagctatcatatcatgtcttattgcaaatctaatatatgacatttccaaaatttatttcagtaaaattccgtgacgaatccaaaatggtgcttacctggctttgtgaagtgtctcaaatttgcatctgaatataattttaagctcacctgcatgtcatccaagtccctttatgatctggttcctgcttatgttcccaacttcaacttctgccactcgctcctgaactttgcactccatcaaagctgaatttgtttctcaagatatggcgcctttatggacctttgtgttgacacatatcccctcctctgcatggaacacgcaccaagcaaaccctgaggcactttgaacgctgcctccacacttccaaggaggcccatgctgatgccaccaccacgtctgggtaattactcttggacgtttactcagtgatgttgatttgtttctttgtctgtctccaattgctatatgggagtccctagattgagtgagactcattgctgttcctctagtatatcttcagtgcctacacatagcaggtacttaggaatttttgatgaaataaattgaaattaagtatctgattatatcagatgttctgaggattcatattactcttcaaacaaaataattgttacattatcaatttctgactcagaagagtagcaaagctagttctctataatattaccacgctgtgtattccatgttaggaattctcaggtgatattaactaaaacactagcaacaaacatactttatatcttaaaaaaacataaatcaataagcttcagataaattcaacaccaagtgctgtgctgtgcttaggcgctcagtcctgtctgactctttgcccacagactgtagccctccaggctcctctgtccgtgaggattctccaggcaagaatactggagtgggtagccaccgttcccttctccaggggaacttctgacccagggactgaacccaggtctcctgcactgcaggcggattctttaccatcttgagccaccaggaaaagccctcaaataccaagattaaactgcaaattaaaaaaaaatctgtattatccttttcaattaaaatgtgagtagattttcaattgctatctttcttaactccccctaccctgcaaaatattgattgataacttccctcttaaacaattcctgctggtctgttttctttcctattcccagactgatctccctaaaacacaaatcctaatattttctactccagctaaaaaaaatcctttaagagctactactacgtcaagatataaccacctcatctggcaatatcctaatgattgtgctgctccctatggcttcagctttctctctcatcacactactctatcctctgtggcacaggttcacggttggccatgctaaatagaattttccagaacaccatgcttcctcacacttacaagccttcattcacacgtgctgctttatctgggattaatcccccctgcccacacttccatgtacgctcccatttagtgaggtcaagttagatggacatgctatatactcctataaaacttcaaacttacttggcaaccaaagcactgtgtttatttgcctatctcctcaagaggctacaggcgtgctgagagtacgcctttttcccatgcccacctcgttttcagggcactgtcacagcatctcctgctgagtatgggctcaatcagcgcttgattaatgacagaatgaacaaatgaacatttctaatacagtgcctttaccaatacctgagcatcttacctcagatatatcaaaatgaaaatccaaggtcttcccaggcaactccttagagacattattaaaaattttagtgaaggatatctcaggagagcccatatctcctccgtaggtcttggggatatcgttgggcacgacaaggcttgctgagcgggacaccaccagttttaagatgttaagggcttccttccaataaggactctggtttcaaaaattaatagacatataaaagttacaaatacgtatgtaactaagaacaaaaactcagttacattgaagacagtgaaaatattatttctataaaaattccttgttaattattcatttttactctgaggtccttaactgagggtctgagttacacaaggatagaaaataagttattatttctactgttagatttataagatatatgcataataatgctaacaactcaggatattttgcactgttctcaataagtgctttataaacattattcattaagaaagtctaatacagtaatctggcagtaggggtaagccaaagggttgtatgtatgtgaactttctagatgaatgaagtacatggccctaagactctaaacttaaaatgttttaagcctcggtgataaaccatttttaatgcatcagattacttagacataaaaatattaaaatatttttaaaatttagatatttcttaatgacccaaataataagcataagtgctgtgctaaaacaatactctcagtgattcctgacctgtatagggtgagctttccccctcatatatggtggcaatgtttctgagttatttttctgctcttttcatatttctaccagtataatttaggaatgatttacatgacagatatataggtggagaggaatcaatgtctaattaagaaattagaacatttctcttttaccacctactgaaaagaatcatgtaaaaaaaatgacttttttcttacttgtggtactaaaatcacacctcaactttttattatacatattgtttcatagttaacagttctgaaccaggtaaaatattactaaaaaaaggaagtgaaaaagtccttagcagaactgagttttccaatttattttaataacatcttgatatgaagccatctaaagcacaaaatattagtgataatagaaatgtccaaatgatattgtgacaatttaagcacatcactatagaaacagtttaacaaaattaaatagaaatcatcttttttttttttcttatggaaaaaaataggagctctgggtactgtaaaatgtgtaagcctcttcagggatgttcctgtaaattatactggtagttgtgttctaaatgtaaaagaatgcttaaatgtacttgcttgctgaatcctaccattcagattctgctttatgtcattcacactgagaacattttcccatcttataaacattcctgaaaacatggtttataaactaaccacttcccctgttcttaagacgtttaaggtgtttccaattttttacgactatatactgtttttgagatgatcactttctatacataagatttgtagctactcacctgtacgtatttgccaatgatctttatgatctccagattaaactgcttcactggggcagcggagaggtcaatatgactcaaaagactgtagatgatctgcagtaaggactgctgcatactagacagtcctttttccagcagctaaaagtaacatgaaaaataaatttcaatcaggttcaagaaaattccattgtattgacattgctgatgttgagaaccacaatacagttaacctaagagttcatggtcagattatcagaaatccagagaataatgaagggaaaaggtaatgtttattattgttacttgtccttgcttcagaaaggagaattaggtagactgttttttcttaaccttagtgtttactttcatacccttaactaatttaattgaacaccatttattttaaaactgctctaccaccattaccaaagaataactgactattcccaagccattcccatcagctgatgactacccatgtaatcttgggcaagcttcttaacctctctgagccctgatttttaaaataaaaagtgataccactttcctattagggtttgtgggacaattaaaattatatctgtgtaattttaaatacatgtaaataattttagtactgttgttagggataatctgagattcattaataatcatagaacaaggataacttatactaataagagtaacatttggggcaaagcattctctttatagactggaaatatactgcccatatgtggtacccaataggctctaccgtgccagtgtcagacctcagaaccccacgggtcagtcttcaggagagctagtgttactctgtgatgacgtgctcagttgtggccgactctttgcaaccccatgaactgtagcccaccaggttcctctgtccatgcaattctccaggcaagaatactggagtgggttgccatttccttctccaagtgttactttagtgttgggctttatggtggcacaaaagtgaaagctggattaaggcacttgaagccaaaggagcttaggtcttaggtctggctttatgttggctcttgtcctcaaggtacaggtgtgagataaacccagtgatgcacattcattcacgtcagggagctctcaggcagacagctcactctgtcagctcacttaaataaaggtgatgggagtaaacctatcaaaacccataccctaaaaattcacaccatcttgagcactttatgatgggcaccatcagtgacttggataagttaaacagtgctgcaagcaatacttacgattatttgagttacaaataatttaagtctctttgtgtgttaggtttaatctctagaggtcagctttctaaaaaaggaagatagcactttattgcaagctgacaaacatttttagtgactaggaatttcttccttttgaaggtctccggtattctctactcagtaacttactttcctaggcatggagttacttcttcaacaaataaatacagtcgactcttgaataatacgggtttgaactgtatgggtctgtttatatgcagatttttttcaataccacagcagtacatgactcacagttggttgaatcacagatgtagagggctgactgtaagatatactcgaaactgactgtatggagaattagcacccttaattccagcgctgtgcaaggtcaactgtgttaactttttatgctgttctaggactagttttaaattctatttactgcccccctatcatattttagattaggaggtaaacatatcaccagaataaatacttgcccagcagaaatggctttacatgctatactattattctagaaagaatttcaaagccaagagctaatttacagaaacaaaaaactaaaaccatttcctaggatcaagaccatgggaaaaaacccattttccattttaaataaaggtgaggtttatattattttgagttttgtgttatttaaagacagtgaatgcagaaatacactcaaaaccccactttccactttaaataaagttaaagtttacattattttgagtttataccacttaaagacagtgaatgaagaagtaaacattgaaaatgaaaaaaaaacacctcatttgtacttgaacaatattacctatatgttttttcctcttaaaaaagatgttacctctattcattcttaaataaaatttgaaaattagtattagtgctgctctagaaataaatactcttgaaaattctgtcacagagcagttgaaagatcattttatgggggtaaatttacctctgcaagataagtcacaagactaaacgttgtatctgagaaggagtcatgcaggtatctgcatactacgttgatccagttagaacaatctctggagtacgtgtgtgtactgtacaggctcatcatgtgagccaggttgacaagtgttgggcatttttcttctgcacaaacctaaaaaaacaacaaaaaaatttcatttacttaacgacattaaacataattttatattcaatgtattcatttaatgaaataatttagatatatatgttgaagcattaatgcattttatctcaatacagaagttaaacagaaaaggaggaagcacaaggcatccttgagggaatgatttagataatatggaaagatggttaatatgtcaagcacttccatgggtgttaagtacacagctttcttttcagtccaatattctagaaaaatgtctttggtaaaaatatttatcattttgtaaaaagagttttgtcttgtaaaatccatatgtttcaaggtacaagaaactaaataggcagactcaaccaggaaatcctcagggaggttcagagttgctgtgccaaagaagaaatactttaatctcaaggtgtttagggtttctcaccaaagcagtcagctgctgaagcctcaacacgtgtgatacagtaaaaggacttcattggagggctgataaaacgcttgagccctgcatctccaatgttcagctaaagctctcaaggtccttggccagtcatttacaggctggtacaaagtatactgactttcttagagtttgcttgatatggtattacagtatctgaatccacaaatgtttgggagaatctaatgggccaaatgcaccttctttgtctgttccctgagtcactgctgaggatgttccttaacctcctccaaggataattgaacagtgaagaactggaaaagggccatgttagtctcagctatcatgaaaggacagccgtgacgaaagtttagttccccttttttaaattttcctcccttattcttccatcttattttcacaaactgcctagagcatttgataaaacaagagtattaccttttaaaatatatataaattttcaactttcagatgactgtaactgacttttatgcttattcatcatgcagacaatatcactggataagcccaagatatgaagacatgcaagactctgcagaaacttaacatagtaccttggaagttattttataaaatcattcaaagcagttgttttcatgcattagccttttactcataaaagagacaccaggaagaaaaaagaaaaagttggttgatatttcaaaataacttgtatttcacttatatttcaagatataattacttgtatttcaaaatatagtaatttttcacactattttataaaaccatataactttacaatttcataatctgttactcttcagcaaaaatttttagtttgaggtgaattctttaatcttagcttgaagaatgacattctgatagaattcttatcttcttaaaggatatttttttgaaagaatgattttttaaaacctagtttttgaaaaggaagacattctttggagtataggccatgcaattttatagtaaagcaagaccagcttaattttggaattaccaggttaaattatgagccacaaagagttatgttttataacaaaacttttttagcatgctatttttgccataatgaatagctaaaaaggacaatatgtgttccaagtattgcctcattttgaaatgctgtgctctccacgggcaccaacagcagcagcagtgatatttgcataatgaggaagcacataatgatggaaaatcactctcaacagttgaagtgagagaataattaaagcatcaatttagtccacatcctgcaggttgctgaaagcccatagagggaaactttgtgtcactcaacaggaagaaaacagacttcacagcagtttatgactcacagaaagccgtatatttgatttcttaaaaacagaagatatttgggacattcctgtgctttgccttgatcatgacagcagaggcttggagctcaaggggcttctgtggtcttctggccacactgtgcttctcacctgccccagcactaagcaaattactcatcacatttcagctgccaatctcaaatgtttctacttcccttatcagggaatttatgctttttattttttaaaatccccaaataagctgatagttttttccttatattttctttcttacccctcatgtaggggggaaaaaaaaccttttgtttacattttcctaatggtatgttatcagaatattaaaatgaaagtcattttaataaaaattttaaatcacttttagacctcattaatgcagatacacattggttttttagtgcaaaccatcattttcacaactaagatgtatttccattaactataatgatgactcttctttttaaacacatgcttttaaaatgattaagaatttctccacatctatttagaaatttaaatagggatagacttaacggcatattttattaaatatttttgtcattcattaaatattatccatcaagataatgaaagtgttcttactcttgtagctgtgtatgtgataattgggttggtagtattttttcgctccactggtacccagagataaatctgcacttactgacactgagatgtgggccagggagaggtgtttgtttagctttctagaagcttgctctttccatttcctgatgtgctatctgctccctgaatctaacgtttgaaaaaagctgcttatataaaaagctcttccagagaattttacgtgcttattcccttatgttgcagacttctctgatttttccccagtgatttaaccaggttattttacttatattactattgagtcacttcttcagttcacctaatttcctgttgtatatatattactgataaattcatataactccttcttgtaactgcttgtattttcagcttgaaaagtcttttttccaagactcaatgtgacaaaataaataaatacataaaattagttcggaattaagtttaaacagaaggcaaagtagttgtgatttctttcttgttcttaagaggaaattactaagtatataaaattcaaaataattttcttttacaatttgattgagctataaaactttttatacaaagtttgtccagaggtgatttaaaaatagctacatacttgtttaagaaatgtatgatgggaaggaaagagtctgggaaggaaagagtcaaaaaagaaaaaagaatgaagggagcagagagaagatgaagagaatgttaaaaggcaaacacaaataactttcagaatcaaaaaatatattatacccttttcttcctcagggactctgcacatgtgatttctcctgcttggaaaatttctaccctctgccctgcttctgtttcttatccagggatcttattttggtcattcctattcaaccttcaaagtcagcttagatatgaattcctcgaggcagattttggtttatgtgtccctagaatatttgcatggagaatcccatgaacagaggagcctggcgggctacagtccacatggtcacaatgagttggacacaactgagcggctaacagtttcacttccattgcaaagtcaccagattctaggtaatcacaccccgaagtctaggccccacggggctaaaggttctatctactttgataatcactgtatttcagcaccttatccagtgctcagtacatatctggtagtgaataaatgaatgacttggaaactgacaggtagaggataaagtagggaaacggagcagaaaaagactcaagactcagaggacagttactctaaacaagtaattttattcactgtcatttgagcaattgtaacttacatcactactatattactccttcatatatgcataaaaataaaaatttagatgcaaaattcacataggaagtgacagtaaaggattctgaagagattccccccttaagatagactctagagaaatttccctccagtgtcatcattcagcgtaacatttgcttacctttgctattcgactagctgtttctttgcaaaactgagttgggctgtcaaaatgctggattaagtgaggcaataagcaaaggatgttaagaggaaagcctatcaaaaaaaaaaaaagcaaacaataaccaattttattgcacattactttaaaaattaaaggtttttattttgtttgttttttcattggttcacagaaaccattttctttttatttcctggggtatttgatcttctaaaaaaaaaaaatgtgtttgtttttttgcttttaccaaaaaatttatgctacctcacatattaagaaaactctgtggaaaagcagaaattagtagatttcaaaacaaatgattagtttacatttcactacattaaaaaagaaaaaaaaaaacagttggtgcaattctattcacatcacctgacaaccgggaaggatccaccaacgtgtgtttggagacagaaatgagtttactcaggaggtgcactgtcatttcctgtgtggatatcgaggtaaaacccttcaggaagagctgctggaggcctgggaagttattccacttcagtttgctttgtacgttttcaatcttctctcgactctctgatttatccaaaggcaggtggatcagcagtttgttgaggagcctgagagccaggaggtattcatattcataatctgattctaacaaagaggccgctatccaaaaaatggtggccatcaagttggcgggctcagtagggggctgcacatcgtacgccgccttctctcgcagggaggaaaggctacgagtcctcgctaagctgctgctgtggttgatccgtccgtccgttatatccagtgtgttactccgccggcggtcccctctccggtcaccaattaaacttaacctcaaagagttacttcttgtagtactgttgtatcccagataactgctactgttaatgggacttgtgcttagattgagttgtccagtgcttttcctgttagctgcatacttgtttcccattataggatcatggtatgaggttcttgaaagaaaaaaaaagaaaaaaagatgaatccaggcacaactgcttcttttgctacattaactgaactcttaaaacaactgaaaaacaataactgttaccaaggaaagtcatttttaaagtatatctgacttaatacctgaaactaacacaacactgtaaatcaactctactccaataaaattaaaatatttttttaaaaaagcttatctgactttgctgaaaccaatttcagttctttcttctctattaataaaaaatgtacaacagtatcttttctactgtaactgattatttcccctgagttggatgaggtttgaagtgaaaatgctgctatagttactgctgataattttcaagtctgggatttggtgaacatcatatccaaagcccaggcctcgtttgtctcatctgcagactcaacagtcctgatgtccctgtttctgtcaattcacactctttccaaaagaaccaagctcaaaaatttaattttgatttctcgttctccctcacatctagttatcattgattaaaaaataattacagaatattttctacatgtgccagtggtaggcaaaatgctaggaatactgaagtccatgaaaattatagcctgctagttgctgttattaaaatattaagagaatactgtgagaatccaaaggatagaatgcttaacactctcctggtcgcagttagaaatgcttaactaggagaggggtactgagatgggacttgaaggataaatcaatttgggatttataaagaggagaaagtttgaagagaggctggtccaggcagaaggaccaataggtggcaagtgggagtcctgaggagcctgacctgctcgggggacaatgggttgttgagtgtgctgggaacagagcctgttactggggctgaagcctagaagcacagcatgaaagtctctcgccagatgaaagaggaacagtattgccacttactagccctgagacctttcacccatcctcactgtctaaggctcattttcccactggcaattcatctgaatttgcgggtattcctctcactaccaatattagaacaatataatattatgcctatttagctactgaagttttgtatacaaatccaccggttgcctggcttatcaattcttactgagaaagggcagacagaagatcataatgcttcatggtttcagctaaagtatcaattgcagattccaacgtgagaagcagctcaatcacaaatccctagaaaaaaggggcagattttaattaattatgttctgaaagaagaaactgtaatgcacatcctgatgagattttaaaatagaacaagttccacattaatattacaaaataattaaactcttgagcaacatgatcttgcggatggatgaaaatgtagcaaactaatggtataacttgcttataatggcaacacaacccacccaaaattgctggggccagaaatctcgaagacatccttatttctttctctcacatctaaactgaatccatcagcaagtcttgaaaacactactttaaaaatacatcctatatctgacttctctacttccagagcttcctttaatccaactatcaccgttttagcctgggctcttacaaatagcctcttaactgacctcttttgccttcctgaggatgccacaaagccacccacagtgtgaatttttaaaaaagcaaatcacacccatcctcctccttttaaaactatgtgtagtttcccatcaattcagagtaaaaatcccacctctcgccagaacctccccaggcctcatgtgatctgggcctgctgcctgcctgcctctggagtccccatcccatacacggtagccactctggactgtttgcttttcctctgaagagcccactgcttctgcctcagggcctttgcacttattagtcctatttctctctgctctctgtcccagatcattacagggctcacttactcatttacacatgtgttcagaactcatcttctaggggattatatacaaaaaaacaaaaaaataccccctccccatcattgtttaaactgtcaccctaccttattattttcacagcatttaccattaagtaaaattgtattatactttattgatggattaaaaggtttgtttccccagtgaaatgtgagctccatgctaagaactctgtggtgtccactagtatatcctcagtatctaaaacagccttaaataacgtcatgggtctatacagacctatgttaagttccctactgcagtatttcatgtaatttatcttaaaaaatgaaattcagtgttttactttacatctaactttaaattcctcttttaccttgtagtcatcacaacatatccaggtgtgtgtgcataaagctgtttttataggcaccacttaattcaatctttataggtaccagctaattcaattaaacatgaattatctaactttgtttttagttctccgcttcttagcatctgacatcataattctctatgacattaaccttgtaaacacctgccgtgatttacatttggaaacaggtccctgacaacgaggaactgctcaacacctgctgaaagaagcggaagactacctgtgcgtcttctcctggatcccctacagtctctacaagtctggagagaacgtcagaaagtgtagctgcagagagaggctgctttagggccctgaaaatctgaaaggatctcccagcatagtgtcgagaagaacaagaaagtgctgtctgcagagcgacctcgctgaggtgatgttccaagtgagttccttctgtgaaaacaaaggacacgagtaagtgcttcctgtttttcagggtatatatagggatgatgaccagaagctaggaaccatattaaattcagtgccagcatagtacctggcaaacggggcattaacatttgctaacattttccaagtcaatgcttttccttttcatacaattctatttgcactttagatgactcttcatcataatctccagggaagtaatccttgagaacaaggtctctcagcgtcaccactgttgtcattttggcaacgtaaaactctgttgtgagggctgtcctgtgctgtgtagttgtgtaatggcatctccagcctcttgacaacttgacacccgtagcaactaatcactgacttcccaccccctaattgcaagaaaagtgtcccaacaagaatcaccccctagctaagaaccaccattttagacatgttttactctgattttcaggatgtgttcaattttcaatcacagaagcccaaaccagtacagtttgtcatctctatatatgttccttcaaaataactgtttcatgatgaacaatcatgttataattttattatactatcatatgtcaaagaaagaacgtcaaagtggcattctttttttcaaagatctatttggtatataccatttttaaagtctttattgaatttgttacagtattgcttctgtttttatgctttgcttttttggccactaggcatgtggaatcttagctccctgaccagggatcaaacccacatctccagcattggaaggcaaagtcttaatcactggaccacctgggaagtccccaaagtagcagtcttattttcaagtaataatttttcttcaaccaaaacaaatctgttaccactaataagttaaaaaagaaaacctgtctaagacttttgaatttagacatgtcaactgtcaattttttgctgaacatcatcagaagttttgacatcacagtaaaagatctacttgaaagtaaatattatttgaaacatttattaaaagatacctgagcttgactgcttaaaaacagaaaccacatgtttcaaaaatgttgtcaactgctcagcactctttatgctaggattcttggcagaaacatcctcatggttccaaaggggccctctttttctgaaaacagagaacagatgtgattcccttggtttttaatttgatattaagttttactcacactcacttaaaatgtgcttttgcagttagaaaggatagtagttgagtaaatcaaacagcatgtcatacagtctactgctactgtttatatactacctggatttgcaatgatctagagcaagtagccagagaaggcaatggcaccccactccagtactcttgcctggaaaatcccatggacggaggagcctggtaggctgcagtccacggggtcgggaagagtcagacacgactgagcaacttcacttttacttttcgctttcatgcattggagaaagaaatggcaacccactccagagttcttgcctggagaatcccacggatgggggagcctggtgggctgccgtctatggggttgcacagagttggacacgactgaagcgacttagcagcagcagtagagcaagtagcagaagatccaagttacatataatttcaaaatgttccatcgttatagtcaaatgctctcagaggtagtaggaaaagatggcaaattttgccaagtgagaagagtactggttactgcttagatattaaaggtcaaaatttatagaggtgacacattatttagattgtaaggcaaagaaaataatttataagctaaaactacaggaaaagtttaggacagaataatatccttcaattctttctttaaaaatatctgtgcatttaccagcttggttattcaggtttcagccctttattagcacaggccaaggtgccctgaaaaaaaatgtggtcacactgcctctagttcctgccacctctaattcatcaagtactatgagactgattttctcaacatatttatttaattgggccctcctccacactcctcattctagctcaaaattttcaataatgtctcctttcttgaaagatatgtaacctctggcctgggcttcctggttctggttctccagtttgaattctcccaagctttcttgtctaggaacccctcaacattacattcaagctggattactcagcagcctgagtgagaaacaattataccttgtttttcacatctgtgattttgctcttgctgtggtatgccagccccttcctccccaactatgtttcttccttacttagagtgttttgccaagagtggaccgtaagtaaatatttgatgattgactggtaatgcagctaatgaaggcagaatatacattcagataatactacactctctttgggcacttaatcattcagacatgattaaggccttcctcacatgtaatcttgtgtgagcaaaagaagaaagcctggttgcatcaaattttctgaatattgcacaagacaaacctgtcttttccaaatcaatgacactttggaaaacaaaaatagggttcgctgaagctgacaaatgaaacgacgacttaacagaggtttatggctgggatgggaagagccgcaaatgttaccttgaggtaatgaattccatgagggttttgacttttccatcctgctctactgagatgtcaacctcgttgaggatagtggtgtgcagatgggaaatggcagcgctgttatttcctaagctgatactagaggaggtagaacttgagctgagccctgagtcggtcatgggggagggctggtaatcaggtataaaatcactaacacctgctgaaagagaccatgggtgtgaatacccagatgtgaaaccatctcccacaatatttaaagattaagctatgggcccttacagattatactggagcctcacaagcaccagagtacatcaactgagtttttgagcaaacactgttttcagagcctattaaaacttaatggttcagattaactatgctagcctgtgctgccatctgctgaacaaagttggaactggcagtttcctgacactggcatatttcctcaacatgtgttaagaaaataatttctacagtgttagctgatttttaatttcttacgttaaggggtccatactttctgcttcactttacttaagtcaagacaattttaaagtctgtgtgtaatatttatattatgccaattattaaataattctaaaggttatcactaatgcccatatttataaaatggcaagaagagccttaaaaacaaataacaaatacaaactatggaattctgaatagaaatgcttaacttaaaaaaggcagtaaactttattccattcatcttttaatcatagttttaaaaaggcaactaagtttactaatgattgttttctcactaactacagggctttgagtaagctacagggcttgcagtaagtaactttaaaatggattaaccctgtatctggcgttatatgattaggaaaaaaagtagccttatttcaatttttaaacccaattattttctgggtcatttattataaacctgatggtactgatgaatgaaataaatgaattagggctattaggaaaaaagaaaatacaatttgaaaagtaaaacaaattcatatcaacagtgaaataaattctacattaaagtctcattaatttggacctctctacttaaaaatacataatttggaacttactagacttcgagatgtgtaacattgtaaatgcaattaatataactgaatgaataaaaaattttaaatgtcttccttcgtcaatttttcagctcttgaaaggaggaggagtctaatacaagtttaccattttttttttttcataaccagtgctcaaattaagccactcaacatttttatgacaaagatccttaaaggtaatagagattcaaataaagtttaattccttcttttatgaattaataatgtcactggtacctaaaataataaaactacattaaaaagtactctctagtatctcaacttcagttgactttctctaatgcaagattaacaaagtacggttctattttcaaaccacttttaaagcaaatacctgtgaaagtataatctaagtgtgcaatttgtttgacggtaagcaccctgggctcattaaactccttgttcctgagaaggacagaagcaacagttcggatgttactgttggatcccattactattaacaagtgcagaagcaggcgtttgcaatgttcatacacctcagggtggcagtggtcaaaccctaaaaagagtagtagacaattatcatcaggaaagggaaatgatgagtagtagtcttgctaccaaatgtatattttaaaaagaaaagcacaaattaaatattttgtgaaagatgacatactacatcaaattttttttattgccctagagttcgttcacacttttacaatatcccatggtcctactggactagggcgagtcaagacaagtttccaatttgttttatgtctaaaatttagtgatctcttagaaaccattactctgttacttaacactagatggacacgaacttctaaaggcaagcattttttgtgcctggaacacaacaagaaagtcagtagatgtttgattactgaaggaaggaagtaatatataatatgatatgtgtacatatcaggaacatttaggagaagatggctattttgacttggttcaggcaaacaatcttacaagcatgaaaagtattgctgagatgtgatggactccacatatttgttacagagggcacagtggagctttaactgtaataattagactgtctacaatctaattattttgggaaacagtcagtacccatttcaattttccatttactctgaaagttcccagtcctaaaggtaaattaattttactcttgctaccattacagactctttcctgctggaaggtatgtgtatttttgtgtgcggagagactgtatgaaaggaacaggaatgggtataacaggcttgtccgtggttaaaagagaggctaggaataacacccctctagaccatgagaatcccagtaaaaagtgtcatggaaacaacatgcaaaaataagaacagaaatacgtagaaactttcttaaaaccataccacttttcccactgaggaaaactatgaaggttcctcaaaaaaataaaaatagatctcctatatgatccagcaattccactcctggggggtatacatccaaagaaaacaaaacactatggacgatatacacacccctgtgttcacagcggcattattcacaaccgccattaaaaaagagtggaataatgccatttgcagcaacatggatgaacctggagggtattatgcttagtgaactaagccagacagaaaaagacaagtactgtgtgttatcacctatatgtgaaatctaaaaaataaaacaaactattgaatatagcaaaacagaagctgactaatcgatacaaagaacataccagtagttagtagtgggaagagggatggttggggaggagtggcaagataggggtggggaattaagagatacaaactactgtgtagaaaatcagtaagttacaagggtatattgtacagcacagggactctagctgatattttataataactataaatggtgtagaatctataaacgttttgagtcattatttgtacgttatttgaaactcacattttaaatcaactacacctcaataaagataaatgaataaaatgcaacctataaaaaacaaacataccatatactgcctttcagggatcacagaaatacacaatgaaagaaatagcaccaaatatttattacctataaaaattgcatgaagaagaagatggaggtagcttccccattccaccttcacactgtgatcaatgataagatccgtcaaaaggatcacggctatgttacacctatgacaaacaagagcgttattaatgttccactagagcaaacctagagaaaatcttaagcaaattactctaagattttaatattgtattttatggaaaaatacaatttcttaaggaaaaaaagaagaaaagaagtacagctgaggaaaccattgagtgatagttttacaaacagcctagctgctaagggctcctcccagtcaagagctatgtttccttcaccttcaaccccgagacctggtgtactgcttgccacgtagtcggtgttcggtacacaattggtacaataatacattttgaaagaatgcagtcactgttctactgtgatttttgctaagcaggaaatcagcttaactcaaaataagagtgcctactactgtaaaatagtatttttcagatgtaataactgggtcccagaaaggtcaagtaactatgccagacacccagaaaagcagcagcagcagaattagatttaataccatttattgtaaacagtgagaagtctgagtttttagatcgcttaaaatctaaatacacggatagaatctgtggcagtatcaaaggaaagaaggttgcttgtgttctgtgttgtcagatagcatagagacagctgaaagtattaagcagcggattggctcatatgaaataggaatgacgctgtggtccacctgtgaagaggtaatccaggtgatgacgtttcaggcaagtaatccaccagtggtgaccagcagcctccagctggtgggaagggtagtggctctccttgattatgctccatcactttcagtcgccaattagaataaagtggcattgagtcacctatcaaaataaaatgatctcattgtctacaccatctactttctgccaatataagcaaactctagtaagacaccaactatttatagcactggaaagtgataaaaaagaaaatttcccactatttcaacaaatgtgtgctaggtagacctgggtaccaatattatcagattaagcaaatcagagagagaaaaagatatatcaattcaaattcctttattttaaatcaaagcaaaactacatgagcacctcatcatgatttcacaactgatgtccaagctatgagaccacagtataggtaaagctgccttgtatcaagggccttctgttaagttactcagttcaaatttctggagatagggccgatataaacccatcttcacaggaaatctgctctactgcagtggggctgcagggtgtagtaaaaaaggccatcaagacatgtgagttctgtgtgacgtgggtaagtcacttaacctctctggacctcagttccatcatgtgcaaaatgaggagattggaccagatcatcttcagggtcccttacggtctgaaggcttgtgcttccatttcaccctatcttagtgttaaaatgagactcggacagagtgctcattttgcaactgcaagggagaatgttcaatacaacctgagtcccaccaaagatcaaacctgtttaaaaaagcagcctgctgcctatgtgtctgttctgtgattctttctatgatgcttcttgagaaccaattcttatgttccttttgatcaacctacagggaacctgtgcttttaaaatgtatttccccacttgatgttgtttctttaagtcaagacatttcagattatgttggaacaccactagtggcagttaaatactcttcttaagaacaatttactggaagaatactggaacaatttactggaagaattattaacattactataatgatagtatacctgacaatcatagttatttaaaaaaaaaaacacatttggaatgtattacttttttcttcttcataagatcctccagagctgctactgtatcgagattctagtctgtgatgttggcgatttaaatgactgtttagtccactgtagatgtctagatgcacgtagctgtgggaatgaccactgaagttagtcacagttcatggtaaaatggtatttgtactttatgtttcactttctatgcttaaaaattacatcacacaaattactaactaaagtttactgtgatatattttaatttccacattacaattcaaaagctttgaagtcagttatttctgcctgaattttttcttaaactgttgtgataataactttctagggaaacctattccatataaaacaggcaagagtgaaatatccatttagaaaagtttaaaaaaaatgtagcaacacaaaaaatgactcaccatactccacctattcatccattggtgcatattaaaaaatctagcatgcaagtgtctttaatgtgaaaaatttccagcatggaaatatatttcttcactagaatattaacaccattccaatagcagaaattatcgtttattctgatgataatcaggatatgtcaaactgaaagattaatgaagaacagagaagtacttacctctcttcaatacactcttttatgggcttattatcaggattgccatccgtgggagcaaccattgtattgctactagaagtagttcctgtcatcagaaataaaacggtatcaatgaatgtaaagcttaggacagctcaataagaactaaaagatttcatactacagatgtcaaaactccactaaaatgagaggaaaagtgaaagttgcttagtcgtgtccactctttgcaaccccatgaactatacaagtccatggaattctccaggccagaatactggagtgggtagcctttcccttctccaggggatcttcccaaccaagggatcgaacccaggtctccagcattgcaggcagattctttaccagctgagccacaagggaagcccaaatgagacggtgatttttaaaaaggtatgtactcttaatgaccaacagagtaaggagtcaacagcaacaaagttagggatgctggaaaacaaatggacaagaagtaattaaggttaaaggagctgaatccagagctgctggtggaggaaacaaaaaacttctatatctatactgttaaaacctccaaaagacttaggaattagtggcaacagagtacctctggaagcaggggttgaaccagatgctaagaatggcaagaatggttgaaagtctatttcagaagtagctgggccccaagagctacacctctacttcttataactgggtgactgtctctgctcacttgaagtcttctctgatgacaataaatcagaggatttctagactagggcacaccatacacaggtgaaggaggaagtactttactgaggataagggaaataagtggaaatatacacacatgcttaacttgagaagacatatctccctgcaaccttcttataccactgggctatcagaaggctggaagactgtaagtgtgtgtatctatggattatacgtatcgagtacacacacattcacacagccctacatcttctattctaggcaaaggattggaagaattttctctggggaatctgattagtacaagagaaaagaccaatggacacttacatcgatgaaatcattgtgtaaaaaaggacatcaacaagttccatatatacctatagaccatccaatcaactcttcaatatgccactgtttatgaaaagacaaatctagaattggtaggcttttgaagaaagcttttactaagacaaatcaaaacaaagaaacagcaatataaagaaaataggaactttcccaggtagaaagctttataaaatatagaagaagatggtccaactgtgaaacacgaaccagatgctcctaaaaagtttttaattaaaaaactctttttggaattaaaaacattttagcagatataaaaaattcaatagaagcattattagaaatctcctagaaaagtataacaaaaagatgaaaccagatgacaaaagtaaattataaaacatagtatgaaaaatctctaattatacaatgttattaacatcacaaaagcatttaatataaactgagtgacaaagaatttcatataaatttaatctacaacagtccatatattatatcaattttcaatggatgtagtttcaactcaaaatattatgataatatagatatacataaaagtaaatacactgacatgattgaatactatgtataatatatgcttaaataattataatatgaaattacacagtaatttcaataagtgagcaattccaatatttacatattaattatatccatttataagagcacctgttgtaaatggacaaaatggatatattccagttctgaataggtatataaacgttccctttatcacattacaaatccttacattgtcaaacctttctactcatatgaggatttacaaagttctgtcaagttaattacatctatgacttaacatttgcatgttttctctaggacgtttaaagcaaacacctgctaaaatgaacagttgtggaaagcttcttttttcatacaaagtaatcatttttaaatgacttctcacctgaggtgacagaagggattttatagctggaagtgatgcggtaataaggggggttatccatgtgagtgactcctgaactgacggggtcagtcagctgtagttcactcaccagctcttcaagcaactgcattgttttgtctctacctaaatatacaataactttcttcacctgtcacaaaaaaaatcgtttggaaaagaaaaagcacaatttttatcacacaaacttgtcaaattttatcagagtaagttcagctttaagtagtagatgaataagcacaatttaaatttgaatagacactgatcagcaattagacattaatcagctttataagtactcttcccttcagccctcaatattgtatcaaattaggatgacctagatatattgcttaggcaatggcaccccactccattattcttgcctggaaaatcccatggacggaggagcctggtgggctgcagtccatgaggtcgcgaagagtcggacacgactgaacgacttcactttcacttttcactttcatgcattggagaaggaaatggcaacccactccactggaaaatcccagggatgggggagcctggtgggctgcagtctctggggtcgcacagagtcggacatgactgaagcgacttagcagcagcagcagcagatatattgcttaatggtgtccataaagtcatcactccctttatttatttttagaaaagcaaaagataattgcctttttataaatcagtttctttttcaatggaaaatgaagtgaaagtcacttagtcatgcccaactctttgtgacccccattgactatatagtccatgttatcagggttgatctcccttaagattgactggtttgatccgtcttacttgatcaatcatacttgatcaaagagtatgtttttgtagtattattgaaataggctgatcaattagtaagcaatcattcttttttctccctatttaaaccttagtacttaaaatgtggtcctcatagaacacgcattataatctgaagctttcggggatacagaatctctgaccctacccccaactccagaatgagaatgagaacaagatccccagctgattcacgctgcattcagatgtgtgagaagctctgttttacatcacccccggacatgctttaaattttaaaacatgctttatcacatcacaccagcaatctgttaattgttctgataattggcctcccacacagctctagatctatccaacctgctctacttgctaattctttgctctcaagttcagtctcctctgatcacatcaggcacatttctgcctctgtgtctttgctctgactcaggacctctgagatgatactcctgactaatcctggcaagtcttcaagccccaccccccactccagctgcaaggcctgtcaggaagctttcctggacttttcatcaagagctctgggttggaattccagctcttcggagatagacctaaatagctatgtgactttgagctatgtcactctttctcgctaacttactttattcattgtaaaactgccgtcatcttaccaaattcacagatttcttccagaaattaagtaatgtaaatgaagtacttgtactatgcctggcttgtaagtagtgcttaagaagtgataattaagaaattattattatcatcatgaaaaacagctcttttaaaatttctggcaaatggcaattccctgaatttcatcttgaaaagtgaaagtgttagtcactcagttgtgtccaactctttgtgacctcatgggctgtagcccaccaggctcctctgtccatagaattctccagacaggaatactggagtggattgtcacgcccttctccaggggatcttcccgacccgggcttgaacctgggtctctcgcactgcaggcagattctttaccatctgagctaccagggaagcccaggaatttcatctcggcttcttggaattacaacttcatgcctgtttctagtgccaaccccaattcagtcatttattcatccaattaaggggaacttcctgtgtgccaggcgctagtctaggctctgacaagaaggcaatgaactaaataaacaaagattcctgctctctcttttttttttctttttgctgcagtgcatgtcttacaggatcttagttccctgaccagggattgaacccaggccatggcagtgaaagcaccaagttcgaaccactggattgccagggaattctcagattcctgctcttaagagctcagaatctcctggactaactgaggcaaaagtaatgaggcaaagaaataaaatatacagtgagttcaatgacaggtgttaggaaaaccaatgaaacagggcaagaaaaagaagagtgtatatgtggcggcagggcatttgcagatttgaactagatgaccggcaaaggtatcagtgagaacagccatttgaggaaacatcttaagactgtgcagaaatgagcaattgactgtttggagagagaggaaagcaaatggcaaggtccctgggtgggaaccctgagtgagagccgggcagcagagggttcagcatggctcaagggcagggggcttgagggggactgttaggacatgtggtcagatagctaatgtggggatcatgttttgtactgcacacccacctttctccaggtgcttctcaatgcagattactgtgacatgccttcaggacaaagctttcagtaatcaggttaacacaggagatgatgggtaaagcaaggctactcagtggttcatttcaaggaggatccataagaacttttagcgcaacactgtagagctagttttccgtggaacatactttaaggagatgctaccttgtgtctaacagttatatctacatatacacacatgtctgtgtgcatgtgtgtatattcagtttaacctttgtgtttgatagttccatattattctcttgagcagatttaagtactgttctttcttcagaagataaagactgtacattattcactgtatatctcttatcatgattttccctgcttccagaagcctttagggcatgattctataggtactgagctctcacttctcatcatgctctaatatcccaatgtcagctgctgataggaaaaagtactaacatctctccactttcatcttactttctgtccaatattatctctaatcctctcagacagtggtggctccaaagttatccactctcaggactctgcagttttcctccgtagcccttaccatgactgtacatcactaacctagtgatttagtcattaaataaattaggtgtaggttcaaagaataaaatctgtagcattcatcagattataatgcccagaacatagaagagcacttggcctgtagtaaagccaggtaatatttattaagtgaatcaatgagtgaatccatgtgctatttcctgattgtcctcctcctggcccctgctttgcctctgttgttctactgctgcccagattctgacatcacaagacactgggtaagtatacatagacatatatatatatatatgaatgtgaatgaacttgaacacatacgtaaggcaagaggcttggttcactatttactccacaaatgctgatcagaaagtgcaatattattttcaggtttttcggccagccatctgcgagtgtggtccacacattctccacctccgaccaggccagctcatcaccatactagatataggaaatacagcacacacttcagcagcacttcagtaacaaccatccattcaatactaaactcataacattgtgaaatattagaaaataatgctttgacagacagctttaatcttctccacattgtagagaaataatcatttctttcaacaaatctaaatacaaatatcattaatcacatatgattttagctccactccccaaaggatattttatatctgatatgaagcttttttttttaaagaaaggaatttatttataacacatacttgtttggattatctaatctctttttctgtttctaacctgtttactcctcctaacttggtaattctgtgcaggaaccacaaatacaaaacctcttacctttgctgtcatgtacatcagattgttcaaaaccatggcagtagcttgtggggatccccagccttctcctcgtaaccagcgcctgctagtcaccatcagttctcggtcttttaaggagtcatcttcatcttcatcgtgtcgtcttgctgtgggcaacggtttcaaatccaccagctcgatgttgttcatccacggtaacaggtagtgcagcattacctgtctcccagcagggtgagctgtctgaattctctggcttatctctgtagttaaggacaagtcaaagagggaacaactgatgtaactgtgctttcctttgatttgtaatgaatttaaatgtaactctttaattctgaaaaaacaacaagccagattttattcactacatttaagaattatgagcactgtttctccttttaataaatctgaccttgatgacatcataaagaaaaggaaacagcgaacacacaccacatccttaacttttatataaaatatctctggtagttaagaaaaatgtttgcacactattggtgagtctgtaaatggtgtaactgctatgaaaatagtgtaatggctcctcaaaaaaattaaaactagaactaccatgagttagaaatcccactgctgactatatatctaaacgaactgaaagcagggtcctgaagacctagttcacagcagcactatttataatggccaagaagtggaaccaatccaaatgtccattgctagacaaatggataaaccaaatgtgttttgacacacacagaatactctgcagctttacaaagaatggaaatcctgttacttgctacaacatcaaaggatcaccttggaggacattatgctaagtgaaaatagctaatcataaaaccacaaatactgtaaacttccacttttataaggtatctaatataatcaagttcagagaaatagcacaatggtagttaacagaggctaggggaagttcaggaaagggggagtttactgtttagtaggtgtaagtttcacttctgtaggatgaaaaatcgctagatatctgtttcacaacaatataaatacactaacactactgaactgtatagttaaaacgattaatgtggtaaattttactatatgtgcttcttaacaaataaaaaaagtaagataaagacaatctttatacatggattaatttaaagtgacccatgaaaaacctcacatatttaggttctatctaggggagactcctatgaagtgcttattatttttacattcatctcatatagtgctcatgataaactttgtgaggtggacagttcgagtaacgtgtgcaaggtcagaaaatgatcaagtggcagaggattcaaatacaaggttgattccaaagcccatgagtttttatatactgtttactctccataaatcactttaagtaaaagccttctcttttctcaagtccccctttgcccactacatcttacacttacaacctcagaactgggtctgaattccagttctaccacatatacacagattgacctaggaccaactatcaacctttgatcctcaccttattctctaagaaggtaacaaaagtagttgtgtcatggagttactgtgcaaactcaacacagtgccaacaatctgctcagtccagtgccttgcacatattatgctcagttccaactttttagaagaacctcttctttaaagtaattaatttaattggagaataattactttacaatattgtggcggtttttgccatacatcgacatgaatcagccacgggtgcacacgtgtcccccatcttgaacctccctcccacctccctccccaccccatccctctgggttgtcccagagcactggctttgactgccctgcttcaagcattgaacttgcactggtcatctgtttcacatatggtaatatacatgtttcaatgctattctctcaaatcatcccaccctcgccttctcccacagagtccaaaagtctgtcctttacatctgtgtctcttttgctgccttgcatataggatcattgttaccgtctaaaggaaccccttctgtgaacaggtcaatatcattaccacaagtatgaaatacgagacctggagttctgaatgaagagatcctggctgagggattttaagtgtgtatgggagccaaagctatggcagcacccactgccatcctgaccaagtccacgacctctaagataccaaggactcctctcttctgtgctaaagcctccaggaaaagcccaggagcctccaagaaaagcctagcagcaggagaattagtggagacagcggttagcttcccaggtaacactagtggtaaagaacccacctgccaaggcaggagacttaagagactcaggttcgatccctgagtcagggaagatcccctggagaaggacatgggaacccactccagtattcttgcttagaaaatttcatggactggtgggctacagtctgtagggctgcaaagagtcagacacaactgaagtgacttagcacgcatgtggttactactttgcactgatgaccatccatatccattctgaaagggatgtcgggactgcagaagttgggaagaaggaagaggcatgactgctgctatttaccagtgcagacctaacatgtgtgctgctttaaacactgaatgttaggagaatttgaatttaagttgttttttcccccaatcagatcaattaggggtgggactcaaactatctccactgctaaaataggcactgtggaaaagatgggccaagaaggtggaggcctctgtgccttgaacctgaatgaaaggttcagagccctggtatctcctgcataccaattctggtgcatttgcagcactaagattagaacgagatcttactgaagatgaagagcagaaaaactagctaagagtcttttgtattataactaataaaactattcagttaaaggatttataagcactatggaggcatctgcaatagagtgttcattgaccaaaaggctcaagctggatgagctccctaattatcttaaatctgagtcctgggaaacccatatatatacatataggacatcttgcttgacacatagcccatgctttagaaactcaaggcaggaatgtttgttggacccaaggaaaggaaactggatcaggaagcaaggcgggttcctagctataggtctgcttaaggcagtacagtatgttcccctatgatgagaagtcttatagaaagaaacctgtacccttatccctgcccatttatattattaaaaatagaccaatatacaagataaaccacacactagaagattcaggaaattttatgtctactaaaggaatattttcaaattgcctgtgaagccccctcctactttttttttttgttgttggctagtgtgaggtggagaagagaggtcaagtttagaatccctttagagatctttactaagcaatctcagtatcaaggtaggtcagtattaaagagttcatattaaaggaaaaaaaacctctcttatataaagacaggttttgttttaattcaacctcaaatttcatagatttacacttcctagaagactttatttttgggggctccaaaatcactgcagatggtgactgcagccatgaaattaaaagacgcttactccttggaaggaaaattatgaccaacctagatagcatattgaaaagcagagacatttttttgcccacaaaggtccgtctagtcaaggctatggttttctcagtggtcatgtatggatgtgagacttggactgtgaagaaggctgagcaccgaaaaattgatgcttttgaagtatggtgttggagaagactcttgagagtcccttggactgcaaggagatccaaccagtccattctgaaggagatcagccctgggatttctttggaaggaatgatgctaaagctgaaactccagtactttggccacctcatgtgaagagctgactcattggaaaagaccctgatgctgggagggattgggggcaggaagagaaggagacgacaagaggatgagatggctggatggcatcaccgactcgacggacatgagtctgagtgaactccaggagttggtgatggacagggaggcctggtgtgctgcgattcatggggtcacaaagagtcggacacaactgagtgactgaactgaactgaaaagtagttttttcaaaatggttgctgaaaaaaaaaactactagccagttgaacaaccatacctgagaatatggcgagagttagctcaggatacgcccttgctaattcttcggacagctgatagtaagacacggaatacagatgcggcagaggggccagctggctgagagcgccgtccgctctctggacctccagcttgtgagcatagcgaaacatcttcggttccaggatctacaggaatgtaatccatccatgtaagattttgtgggtcctctaaatttcagctataattaaaaacataaaattttctcccaagaaacattatagtttaaaagctatagagttgtatacattgtaaagtttcttggatgctaatctctaattcccagaaatgttttcaaaaagtctctaattcttgtgctttgtaattccaaatgaatactaggacagaggattagaaggatcaatttatcttcctttctagcacttaaggaaaaaaaggaccagtcccatcttgacaagctctgtaattctttacaagactttaacattccttgtattgaatgccagtgacagtttgaaaataactcctgcaacttaatatacaattatctgaagaagatttaccacttttccaattcaaaattatgactatataaaaacatgcatacgtgaaaaaaaaaatcttcaaacctattttgcttaatcatggattaaatataaaatacaagcaaaaaattcttttgatattatagtatacaaagagctacaccactcaaccttcttcttaactaataaagacactagggtataattcttaggatgatccctcagaaccacttcaaaccctttggaaaaatgtgcatctccttgaatcccattcttaaccctggttaagaatgaagaactacatcctaccatcagtggatataaccatatatccaagtgaaatttctaagttatttgtctcaatctaataaagaaaactcacaaaaggttatcataaaagagctaattacttttcacttgattctccaaaacaaactgactcacattatttttatttgctcaacagaaacaagtgaaggcacacagaggccctaaccactccacttttccaagtacccacacagagacacagaggcacacacacaggtgagtgtgggggttatcacacacaattctctacgatacactcaaaactttgcattatttatagtgacccatattatcttagtcttctgtttctaatgataattaggaatcataccatacatcactattaaaaataaagatgaacattagcatactttcaaggcaagaacagattgctgtgcttcattaagtcccgagtaaaaatatattttaattaacatttgtttacaaacctgtaaaagttgcatagcaacttcatagatacttcgagaagaatcagcggctttaaacagtatcagattgaggagcatcactgtgtcacactgataatccctagggacaaatttcacatgttagataaacaatgtttagaggctttcacaccagttaataaacatgatatgatataaagggaaggatgcaggcatgcaggggctaagcctatgaggtgactgtatttttttttaaaggcaataggtacgacagatggtaatcattatcactatttggttagattttgttcgagtttaaggtaagaaaatattggtttattaatattgctgagttcaaaaagacacattctgttttttaagagatgctaaataatgaaagacagcaaaatctagagtacctgttctggaaaacattagctatggctttgaaacagccagctgccactctcttggaaccagtgtaacagcgatccaccgcccaatacatcaggttgctctgatccgggttcagctccagcagtaatgtaactgcctcacagcccaactgatgaacctaagtaaaggtcacaaaattgcccaagacaaagaaagggatatattatttatctactcctcttacatttcaattaaaataatacagtgcatatatttattgtatttcatcacaaaactcaagtctcctttagttcaactctttctgattttattcaaccagcagaaccaccaacacagagaaattaaacgtggtctcctgctttttatataagactcttagttgtaccattcaattttccagcagagccccggaggtggctgatgaatgggaacagtgattaagtgctttcaggaaaatgagtgattaacctccccagctatttttgttgaaatttattcttatttttgatagcccaatacaaaatacatttcttccagggggaagaaatgtaagtcttattttaaattgtgaagtctgtgtttgtatggtatgagtaataaggggggaaaagtgattaattggagaattatcaaaaaaaattaaacagagcaaatagcatatttcttccatggagcttaaagtattccacaattatactcttttactgatttaaaaccctttgtgagataaatacacactactattctaatcctctaagagggaaattaaaattatttaaatgagaactaaataagaattagaaatctcttagtttatggtattctacttagttttacataatatgttttgggcccgtaattctaacctatcttattttaaaaagacatattcagtgagccatacaatagctctaaataatgcagagagtgtgtgtgtgtgtgtgcgcgcgcgcgtgctcagtcacatccaactctctaagaccacatgaattgtagccgcccaggctcctctgtctatgaaatttcctaggcaagaatactggagtgggttgccatcttctacttcaagggatctttccaacccagggatggaacctccatctcttgcgtctcctgcactgacataatttacccccagcgccacctgggaagctcccaagtaatgcaatgcagtggtgatttactaccaaattttaagggaactgtcataattacctttttgtccagagagtccaaaatgttatccaaccatttgtacaaatagccatctgatgaaagtcctacattatctgcaacagggccacaacagagtacagcagacatagccttcaaacaataatattagaattacatttaaaacatttcagaggttaaatgttggttgcttaatgagaagaggcacgatattttactcatgcttatgtagccgcaatatctttaatttttttgtttacaaagaaaagcataatagtaacttttgaaactaagaaatttactatgagcagtacataaatatcatgatactacattagacatggagtttgaacagtactggaggtgaagggaaaaaaaagatcaagagaaagtacttaagtaagaaaaaaataagtattttttggaggcaatcaattctttaagaatgtggcttccaattttcatagattttggaatatttctacattacattttatgcatttaaataaacttccagaataagtatttgaataaagcaggcaaatatatattctagtactctcaggtactctgaagaaatcctgatcctttttataacaccaggcactgagagaaaaaaattttaactccaatcttaacctaagaaaacagaagtcagatttttaggtaaataccttcagtgcacagtactgatgtctgttaatttgcatatttctatcactgtatctgtccaagggtgtaaacatgatgctaaaaggacctgcccagtgactgaacagcataaacagactgtgacgaaggctctgttgaggaaaaatacttcttctctggtgcactgtgaataaaaaataggcggaaaaattatttccatttcttcttcccttaatatgcacgtcagtttatttgttattggatggtggtgatgttagttgctcagtcgtgtctgactctttgcaaccccatgggctgtagcctaccaggctcctctgtccatgggattctccaggcaagaatactggagtgggttgccattcccttctccaggggatattcctgatccagggattgaacccaaggctcctgcactgcaggcaaattctttaccgtctgagccaccaggattgttactggatacataatattatataaaaacaaaggaaaagttttcattttaacctactcccaacctccatagtaacagaaactatttacatatatgcatatcacaggaacagagctgcagtgtacactatcatggtgagatgcggtattatgtgaaatatagcatcttggcaagtagaagcgcatggcagtcacaatgctactgaaggctgacagagctgggcatcaggaccctgcttctctccctgggttgttgttggctacgtgctaaccttggccaaaacattaacacaacatacttctggatcatgattaaccggtaagagagggctttggactatacataccgttttcagctatataacaatcattacatggaatcttgacatattgatacataacagacgacaagggagctgatctgcctgcagtaaagcatgaggtctggagtcaaaacccactctgctgccttttgctgctggtttaggtgatctccaaggaatctttccacttaaaaaaaaaatctattctacaagctctctgcagcaatccttgttgaagaaactcaacagtatcataatgaaccaaagtagaagctgcagacaagtgctgagtaatggattaaatcatatctttacattagtgagcttcagctcagacaatgtagaggaaaccatggagcatcatgatgcttcctctatggagcatcatctacctctcaccttcccaaagttactctgacatatttttcaaatgttcacaagttgcttgtcaacttagattaccattcctcagggggagaaagattatgatggtcttttaatattcacctatgggtttgaggaactgaaaatcatacctggaacattctgaatgatattcgccactaaggcactaaaatggcatcgtatatccttcagtgtgtcagaatctttttcattttctgcttccaggagttgtctagttaaatctacgtattccaataaagtgttgttgaggaaatgtgtttcactatcaaggccaccacttgcactgaaaatatggaagaaaattcatgttaaggaaaacactgattttaaactataatttaagtcaacattattctctccatcaaaatatacggcttttcaaaataaaaatataaggagacacaacaggaatagggaggatcagtttagaaggtagaaagaagaaagactaattgtgtacatttacacagttgtcctacatagacatattatgcctttagcataatcaatcaaatatccatcaggtacctattctcagcaaaaattactgctattactggggatgcaaaaatttaagagaattcaagtaagactgttggtattttaatcttctattttagaccttggaaatttaagaatctctacaggaaggttctctttgaggccagggttctgggcctagagtccagtgactgcaaggagtcactggtgaaagagtccccaatcctggattccagtcttgtgccatcagctatgaagtatgtgaccggtaggtatttgagagtgttttaccaacagaaatttagttaacttttccttgttatatttatctgaaatacctctaaagtttatgattccaaaagtaaaaatactctttcaatagctacaaatagttttttataaacatcctaaagccatgaaaataagagtaaggagccacagtgattgtacagcatattaaaaatatcaatctatgactataaagatacgttgaatgtattcatgatgaaactctcctttattccttaagtaagtgcttttaaactctgggtcaacacttctcagtggctgggaaaccaacatggtagattgtaagctgactcagaataactgagtacctactatactatgcaccaggcacagaggatcaactgactgaacaaactgaagatccctgcctcctggccattccagaattcatctttttttccttaagtgagagagaaaaaaaaaatgtccataatagtgttcactttattttgatttctcttggggcaaaaaacaaaaaagacaaatccaaaaataaaacatgcaactgcattactaacattacaataaaagcaagaaaaaaagaaaaaaagatttagatgtattttagattaattttttgcttcaagttcagcaagtgtcaaattcattttggctaccttccatcgttttatttttgtgaagtagcaaaggaaaaaaaaaaagaatgacgtttcttttttctttcatttgcttttcatgtactataatagtaaatcaatggtttagattctctttgattaaagctatattttgaaagcacttgtgaaaaacattcgatgttaaatatgaaacgtgttaggcacactcagaaataaatgatcaggataaatggtaaagtaataataaatactgtacttgcttattaatatttttttcctcagtatcttttctggaaatggtcagattcatttttttactccttcaacggtcagccaacaccattatgtttctagggaaacagttatttccctacataaagctgatggaattttcctcaaggcgtaattttaggttttatgtttgtttgtaaagggtggaaatagaaattatgtgtttggatttcataattgctctaagcacaatagattaacagttgattgaagtaaatttgcaaagttttttaggctaaactttcatgtagcctttaaataacaagatttttacaactctagaaaaaatagatcttgaataaggtaagacatagttaaaacagacacccatccctggggaaaaaaaaaggttgctgtctactgcctagattactagatctcaagaaatattaaaatcataaggacattccactcaacctttgcctgaagcaatctgtacaagtagtagttcttcaatatattttttagccatgggctaatgtattagatatctttagtaaataatatttatagtggtgcagattttttgttgttacaaaggtacttttcggtttttatatatttcctaagagaaaaaaaaactatgttctctaataaatttcaggttttaaaaatcaaaatccagtacctacctgtgactaatgacaccagcatctgccagcagttcaaatattcgtaccagttgtactcgtaaaatatctcgacgcctgcgccgtttcatattctatcccaaagataacaaagattctaattaaaagtcctttaagtaagttgacagaaaatttgctggtgtaacttagaaggaatactgggaatgccttacgagtttggagccttgttattttgcttctgcaaggtagatgtcagacagtctaggggctattacatcaaaaaggtatgtgtggattaatttgaaattaacaagataataaaataaaatgacattttatatagtaataaacttatgaagggagaaatagaattaagtccatatttactttatggttacttttaggtcagatttgctactctgacaactttagaggaaccgaaacagttagtaaactattctctttggatgataaagaatccctaagatgctcccaataatatgacagaaagggagggaaaacatcacaaaggggactaaagaaaccccatagatttcactcataccatgatttttcacttatcagttaattctgacacacaaaaatacaagcagaaagaaattcctttgatcattatggtatgaataaatatgtttatcctaaggccaaagtattaatgcctagaatagtcgtcgtaacatctcaacttgattctgcttctaacaggaaccaatataatggtaagctgtaattaatctcctgtatcactttcttcttgggctcatcatttcattcatgatgtaatacagactactaagaattcgtctttcactttcttgtctacaacccagttttctgccttccaaaacaggccagttgtagataaccagttcattaaatttactgcttctctgagctcttatcaagtttgctgcaatttgtactgaatgaaatggtttaacagtgcttgaggatttctgcaaaggtttagttgacttgctttcattctgtgttcattcatagaaagactgtgagtctaatgctctcaaaatacagtgcacattcagacacatcactgtgcatatctattcccttgctatgatgactttttgtcctgaaactgattagtatacatactgccacttaattttatttccaattccacttgtactgtaaccaacatattattttgaagcaaaaatctaatcaattacaaaatggagaattatcactactccaaagggctgaattagaaaaaaaggaagtgaagaattacagatgctgtcataaggtccccatacaaagtagctactgtcatcttcctctcttgctaaaattcctcagaggactgccatcgttgctagcagtcattctaattcagtgttctacatcagactcatctaaggtgcttaagaaaatagatttctgggctctactccagggattctcattgaataagctaggcccaggaatctataattttttgcaagttctctggctaattctcagattctactgccatatggggaccactggtctatcggataaagctgaaaccaggagctttaatcctttcacatgatagttcctttcttgctttccagcctaacgttccatcactttccccataacataattacaaagaaaaacatgcaatgtacaaattttttaaaagtaaagttttcaaacgctgttccctctacctagaatgtctttcccttgcttgtctactggggaaatatgcttcagaaattcacctcaaatgtcactacctcaactaaaaagctttctcttactccacaggcagaatcaaaggctttcttctctgtagctcatctaaccctttacctattacttgatttgtgtgcataatacattgttgtaattatagattatacaacatctgttccaaaagaactgtgatttctaaatgtagctcagaactggacgtgtagatatggggttctagaccgggggttggcagaatacagccctcaggccagatccagctcactgttgcctgtaactgtaacagagccacacccacctatttagctgtctaggcagcaaaactgagcagctgcaacagagacaggatgacctacaaagatgaaaataactatctgttcgtttacagagatcagtggactctgatccagactctaaccaccctaacttcaggcagagaaaatttaacatctgtattacagaattggtttctgagtaaggcctcctggggagtggggatggtagtggtttccacatgttttaaaaatgttgaaaatggcattagacttatttacttctgaatttctaaattttgttatactatatagaatataaaagccaattttaagtgtttgccaaataaatatttaatgatataaaactacacagtttacctctggccttcgttcaagtgcctctttaattatgggatgtaattcctctattagttccctagaagaaaaataatatatattctttcaattaatagccaagcatataatctgacctgtagaaatatgtaaatattaatataaatgatacaatctgacaaatgttaaccctaatcgtacagttttaaacacaatttttattgtcgttttgttttttttttggtcatactacatggctttacggaatcatagttccccgaccagggatcaaatctgggtccttggcagtgaaagcatgcagtcctaaccactggaccgccagaagtctctgttttgttttgattgtgaaataacacaaacactctgtagaatatttgaaaaattgaaaaaaatggtataggccacttattctaatttgtagagataaatacctgctcaatcattttatagcccatatatagtttacatagttgaaactctaacatacataaaatattatccttttatctttaattaacactagtataagcactttcacatgccattaattaatttataatactctagtattgggttgaatatgataattttcctaaccattttcagttattaatgactcattaaattttatctgttaaataatgtccagtgaacacctttatatattaatctttgagttcaattctgattatatcaataggattagtccttacaaatgaaattatcagtcaaaaggtatgaacttcatgaaaataatcttttttttgcttatatcctgattttaaatttaaatgtactcactgtagaaaattgggaaaatacaaagaaaaaaagaagaaaataaaattcatctgcaaattcattgtccgtagaaactactgtagacattcaaagtatctgcttcagaattgtttctatttatggggatttgtgaaactgagataatttttgtacctcactgttttctattagcacaacagtgtatttgctgctgctaagttgcttcagttgtgtctgactctgtgcgacccaatagatggcagcccaccaggctcctctccatccctgggattctccaggcaaaaacactggagtgggttgccatttccttctccaatgcatgaatgtgaaaagcgaaagtgaagttgctcagtcatgtctgactcttagcgaccccatggactgcagcccaccaggctcctccgtccatgggactctccaggcaagagtactggagtggggtcacttcatttataatgaatgctatccacacctacagatataatttattaatctactctctgttgtatatgttaccttggagacaaaacatcaaacattacaccacatcaatagaggacaacctcaaaagaaaaaattcaggatccagaacttccctggtgacacggtggataagaatctgcctgccaatgcaaaagacacaggttcgatccctggtcgaggaagattccacatgctgtggagcaactaagcccatgctccaaaactactgaaccgtgagcgctctagaagctgcatgctgcaactgctgagcccacgttctgcaacaatgaagcctgcacatgctagagcctgtgctcctcaacaagagaagccatggcaattagaagccgtcactacgcaatgaagagcagcccatgctcactggaactagagaaaacttgcacaaagcaaggaagacccagaacagccataaaaatataaatatttttttaaaaattcaggatctagtcagcaataacaaagaagaaactgaggcaaaaatgaagaatttgctttatgtttgtgaaaaacatcaagaatgacataaaatatgtacataaataattcttttaagaatagtcactctcttgaacaagaaggagaaaaactacttttaagcaacagatcaagcaacagaatcactatgtaagagaggaaggaaaatatacatttacatggcatcttatgatctctagaacatgtttatgtataatatatgattttcataatcattctttgaagaaaatagggtaaatgttaagcaaaattagaaaataaaggtacagataaattaaaggacctgctaaatgttaaatggctagctagttggtaaaagtcaggatcgatatgaaactatcctgataagtatgctaccttgccatctcaaaaagtagccacttttactattttactacatagagaaacatataaagataattacctaaatgctcctgggttggtcctgccaagacctagaacaagggattcagtgatttccatgctctcagagcgcatcattggaactatgtgcttaaacaaggatgaaggggatgggatgccaataatctgaaaaaaagacattatatttatagtagccactaatgatagtacagtcaagtaaaaaatatgacgtttcaacaatatttggtcacagacaatggaataacgacattttagaatgaatggtacttcagaattcacctctaacgtacataatcttaaaagggtcactgtgaatttgcacactacaaatttgttaacagaagtgggatttgcaggcctcttaatttcttacagacactcactatcatgtaatacaggctgactctctcccttagcctatttcttttgacctgtaaaaataagtaaaaacaaaaaactacttctaaaagaataatcagtgttaaagttaaacacccagtattaagttttgtcagtttccttcaaccatctgataatattttatttcatatcatggagaccatatcactgttcttatcaagttatttgtcccactacataatttagggaaattctaaaagaaaaactttatatattattggttccaactaagcatccattaaaacaatgggttggccaaaaagttcgtttgggtttcatacattgctatggaaaacctgaaggaacttttgggccaacccaatagtaacggggatttcttgaaccattttcagtattagtgcctgtaactaatacacttttcaatcaagttactttactgtcctgaaaaagaaattttaaaacattccttttatgctgtcatttggattcaatgacagaactcaacaacttactttagaatcaatgctgtagccactgtcaggggtggacgccagcgtctcaggaggagaacacctcacagaacccgcagatgtcgagggcgctgtggaggtcgccgcgctgcagcaaagaagcaggtagtttctccacaggccaatgtatgagtcactgcttgtggtagtactgactttcttagcattgatggggctactgagaaaaaggagaaagacaggtagatgtaaataacatgtgtttacacaagtttcttttaaacgaaagctcctccgtccatggagttctccaggcaagaatcctggagcgggtggccgttcccttctccaggggatcttcctggcccagggattgaactcgggtctcctgcattgcaggcagattctttaccatctaagttaccaaggaagtccaactaaagctaaatttctaccaatttaggggagatggttagcataaagaattagtactactgaatctctgtggaataagatataatgagtaaaatacaagattgaaagttaaaacattataggatcattttaacataatctattatttctgtgggtagttaatattttatcaggtcacattttataacttattatatatactcaacgcagaggaaaaaaagtgaaaacaaaatgaaaatcaccattaatccaacaccaaaataagttctatatattcttctacacatcttcaattcagacacatgtataaaggtataggtatatctcttttagcttataaaaactgaataataatcatttcatttgttttgtacttgttctttatacttaacatatatgttgaaacatccttcatataaataaatatacttccatgacctcattgttgatgaccatatgttatatcatagagattattataatttatagaggcacactttcactgttggatatttaagctaacagtaatttttccctgttatacacaatattaaacatttgaatatatgcttaattataattcatgtttaattattttcctgggtaaattcctgaaactggaattgcagagtcaaagaatatctacatttttaaagcttctatcaaatttctgttttgagagattagaccactaaaatattttggaacgattccataaatcttctcaaaaacggaaaattctgttgggattaacgactgagagcaaaacaaaacaggaaaaatactaagttttagtcctcaccttcagtaggcttataatctattaagataaacaatatataccatgccattgattcatcaatagtttcttaaaaaagaaaggtttcttaaataaaaaaaaggttcagagcactatgatgggagtaaaagaacaacaaaaaaaacctgcttaaaaaaatcaccaccatcatgtgtgctaggggagatatacaacacagaaataaaagtgtcagatggtgctaagtttgatgaagaaaaatagagcagaaagtggatacagggaacggtggtaggagagtgttaggtggtaggagaggtattttatcatttaaaatatggtaaaataaaggagactaaataagttcataaatgttatacaaggtggcaagtgtcaatcttcattaaaaaaaatggcatccaataaacaatacctgagaatctgtatcaatatacaattaacatgtatgtatgctgctgctgctgctgctaagtcgcttcagtcgtgtccgactctgtgcaaccccatagacagcagcccaccatgctcccccgtccctgggattttccaggcaagaacactggagtgggctgccatttccttctccaatgcatgaaagtgaaaagtgaaagtgaagtcgttcagtcgtgtccgactcttagcgaccccatggactgcagcctaccaggctcctccgtccatgggattttccaggcaagagtactggagtggggtgccattgcatatatacaaacaataaaaacaaaaccaaaaaatgtatatatgctttttcaaacaaattttctttgcaatttaagaataagactaacctacagtttataaagccatggtcaactctctgtcacattgtcagttacccttaactctttactatcatgctcagaaactcactgaactcatttcccttcacttctcaccctttatctacaagcttatctatatccacatccatattcatcttcagactctctcgtcattcattcattcattgaacacaaagtatgtaccaagcagtgtgatgattaagtaaatgaagaattataatttgtaagaccaaattatacaaaaagaatgaaaggattatatgactatctcctttacaactttcattgtcctccttaacacaccagtacattatggcatgtcatttatgggatttccaatttgtagaacttttcaagtgcatgtgttatgaaggctgacagtctatatattgtaaaatttacactaggaaaatcacttactttatatcaacttgtggggataacaactgaagccttgtgtaggcaaacatccaagcatagctcacagctgtagggcagtgttttggaaggttttcttgctttaaaaaactggagagacttataatccatgggtcttggccttgggtcacatgtgcaaatatccatatgtgtgatggactgatcacatcaaactggtggctaatgggagaggaattccactctgctaatgtctgtaaatctattgagcttgggcagtacagcaaagtagtctaagcagagaaaaaaattcattattgcatatttcaacaactttcgtaagttttaccatataaattgctttaaactataaaagtggtctactggtagtttctagaacagagattcttaaacagggataatatgaagtctgagatacatttaaggaggtacagaattcctgaaattgcatataaggtttttgtttacatgtagttttctagaagagattatgtaatttttattagtctcaaaaagatgtataaatcaaaaaggttaagaatcaccacttatgtaattcttgtatgaatatgcaactcacaggatactcaagatgctagagaactcaaaaatgaaccattaactttcatgctgatgtgcactgcaagacaagcgaaaatgtcagttgcgcagtcatgtccgactgtgtgtgactccacagactgtagcctgccaggctactctgtccctggagttttccaggtaagaatattggagtgggttgccatttccttcgccaggggatcttcccgacccagggactgaacctgggtcttccacattgcaggcagattctttaccatctgaggtatcaggggagccactgtgtactatgtatgcataagtggaacagactggaaaatgggctcctctccagagctgctgctgctgctgctaagtcgcttcagtcgtgtctgactctgtgtgaccccataggtggcagcccaccaggctctactgtccctgggattctccaggcaagaagagctacacattctcaaatatttgctcaataatagtcaaagctcttaaaatgaagagataaagacttcagagcaaattatttatgattcaatagacaacaaaaaatggagtcttaaaaactgaacagaggcttgattcacttgatcattcaacagatatttacaaaggacctgctctcagtcaggctagaagagagtcactcacttctcttcttgttggccaagtcatagttaataatctaaaacagaattctttaaattgaacagaattttattattctctctcttggttacatgtaactttgagttgtaagagtcaagagttatgtagaaagcacagaaacctcttgtgcaggtattgcaaaacaggaagaaaataatttcaattagtaaagtttgatacttattcttatatcagttttgaaaacttgatatatgacctttctcccccaaaccaaactaagaaagatagcataagctttcttagtaatgtatatgttgatgaagtgtttttcttcattttaatgagtgaaattacatctgttgctgttgtttagctgctaagttgtgtatgactcttttgcaaccccatggactgcagcccaccaggtttctctttccatggaattttccaggcaagaacatgggagtgggttgctacttccttctccaggggaacttccaaacccagggatcgaacctacatctcctgcattgacaggcagattctttactactaagccacgagggaagccccaaattacatatgactcaggcataagatattacatatttactctatgctcttgaatttatataaagcaaacaaatacacttactgcaaggtgcagaatgcaatgtttttgctttgaatttcacagaaataatttcgatagccctttaccagcatatacaggtcaagaatactatatgccataatcaaaagcaaatagtagtcaattgcaacttcagatttaatagaaacttcttagattggaaagactggaattttataaagataacatatttatatttttgtggggaagagtactaaccatagcataaagtagtgctactttgtgtatgctgctttttaaaaattattttttattttcaaagcactttaccattttcacaaatactttctaatgcatgatatttgtaaaagaaactcaggtatgtatgtatgtacatcttaagtttcaaaacattgctgaagagcatgaaatcattacagttacctgatcggccccagtgagatgaatgaagctctcaagaatggatgggctcagcctgtccatcacatctatggctaattcatcatcaccctataaaaaagacatcacatgtctattaaagtttaggaatgttaaagaacagcagccaaacctagataaacattacaaatatactctagccctatctgttacaaatggaatagaaggcagacaggtgagcttagaccctctcaaaaagatcttgttaaaaagtaaattatacctgcatggtaaaaacagaaatggaacaaagatgaacaaaaggatagttttttaagtactttcattagatagctgaatgaaatatctaaaatttaccttaggtatttccaaaagtgcaaataaagcccgtatttctctaaggacgctgacagctaatctcctagtggcaggtcggctgctacagagagtgacgagtgcaaacccttcgaccacatggactacactggaatatgggctcctttccagaggagggggatgagaggctccattaactacaccatgcttgaaaaacaaaacacaagtgaaaaaaaaaagtatgtattccagtaaaacaattagtaaagagtaaagcaaatcataaaaatgactgctacaggtctgcctcagctcaagaaatttaaataacatttaatttataaaaataacatttaatttataaaaatttaaataacatttaatttataaaaaataacatttaattttttcacttcatatagtgaaaaaagcatttaattgacagtctaaaacacatgaatatgcaatgtacctaagttctataattctctggctactttgtaaaaagctttagagttgacacttaatcactattggtccaacatttctatatagaaaatgaaggattgaatggcatcctctgtactcaaagtttggaccagcagagtggcgtcacctaggaggtggtgatgtgcaggctcattgaacattgagaagctgggttggcttagatgatccagctctaatatccaaggttctatggcttccacattttcacaaatcaataatttgagcaccctttacggttaagaagcacacatactgtatatgtgaaatggggaccactggtgcctttgataaacaaccaaataactcaactgaaaggctatcaacatttttttattataccagcattcaatatattggaaacagcctatatgtgagttagaattgcctccactttattaccaaaggaagaatttaatttctatatttaatacataaactataggaaagttctgtttaaggggttacaaacattgtgaaaggaagtaaaactaaagaaacttctaatttttgaggaagagaatatgttttaacatcataaccagtcgtttaccactgaccatgcacagaggaacactataaaatagtctggtacctgtgagtcctggtttttgttatgcatttgggttgcttgtttccactgatttattaattgtaccaacatctttacagcattatcaagaagtgtgggatggacatcagtcacttcacgaacaataaaataaacaaatcctgaaaggacatcctcacgccaatctggaaaatcaagcattagtgcctgcagagtattgaaagccagagcacgaagttcttcatccatatgaattgtgagcctaccaagaacaaaattccattagcaaacctcaaaaaccttccaaagagctttatcatctaaaacttaaaactaagaatttaaaaaatacatcctctcaattgattcttaagaagtaagaaaataggaaccaatgttcactttttgtgctgtatttgtccttatgctaatctgtattcacttatttaaattcacatgtcaatctattaatatcagttggcatcaaaatagtaagtttgataattcagaatagtaagttcgatcataagtcaaatgctgtactttagaaaacacagactaacgaaccagaattacattttaaaaattctgtaatccttaaaatgccatatattattctataatcaatcaaatttatgcggaattatataataccttagtactagcttacattgatttagtcctatactatcaatggaaaggacacagtttatctctattgctcctttcacgctgctgagcttacagttaaacataagatggctgattgtgaagaaaaaaatacaagtcaaaatggaatgaatttaacagaaataattcttgaaaatgaaaatgagaattaagctgtaacttcataaatggggttgcctagaaagaagatgaaaaaaaaaaagagtaacacatgaagtcttcaagagaatttatgttaagtaaattataggagaggctatatagagttaccttttaaagacatcaataagatagaggacaggaatgtaatattagttaaaggattttgataggacttaaagagaatgataagaaaatcataaaagatggctgcagcaatgaaattactaatatttaatgctatatgagtaagagtttctatttggggctacagagaattatttacatgattgaccatcaagacacatgtatcagggttagaaacagcctgaatgaataaagataagtaggtgatatttaaaaatatgccacagttacatgcttgggcagctgaaaagatggagttatcctcaatgatagaggaagaacgctgtgtaatatcagtcttcaccctgctgaactcagttctggtcttcactaagctaaccttcactgataatgagactgcggagaaaatgtatacaattgtttaatacaaagacccggaagtgagccatgaagcagcagcagttacagcagcactctggaaataccacacagggtcagatcaagggtctcaatccagtgctgtgtctctgatcgtggcaccaaaggagagactgtgggaaaggagagtgaccaactccacgctgctggctataaaggttgttcaacattccgtaaatctatgaatttacacctctctgcgtgactcgggatatatccatgcagagaaaggggcctgattcatttatggcaggagaactattgaaccgttcctggagacagcagacaggtctgcaaacttacagtgtatctttgctttgtttgtttgcttgctttattctaagtaaataagatttagacatcacaattgcaaatgataggagctagggacaaaataagcagacctgggaatcaatctttctaacaaaataaattaagtatcacaggagaaagaagcaaagtcaatagcaaagcaaactgtcaaccactggctagatgtctgctcctttactcggctcctccaccgctgccccttgcggatgccacttcactttggtggggaatatggactgccatccacaaaatagtgaactaaattgaggtgggaggagtaagagcagaagtgaatgacacttgtttactgctttctcaaggaataatattataaataattaaacttgttttccctccctaacactgacaggaactttgttaactctgcaatctaatttatagcaagagttaagagatacagtgggaagggatgactctatctcagggtaccaagtttcaaagtcacctctttcttctcctcctcatccaataccattcaatctcttagtgcaacccttaagagctgagggtgggtagtgtatgggtgtttgaaatgctccgtgaccagggaggtgggaaaggctgctggagcagtctattaactgtttattcattgtgagtttaacttaacacttagtaataagagttcagcaagtagtaaacatcttcgaatatggtaagatatcactgttccattgacagtctttgtgcttggtttcccattagggcggggccagtaaactatggctcaagggccaaatccagccaggctccttaacaggtggctgcttcttcactacaatggcagagatgaacagccgtgacagagaccacgtgactcacaaatcttaaaacagtcactatcttgtcttttaagaaaaaagtctgctgaccccttatttaaagagaatctccaactgtatcagcaaagcagtttttcaaaaggccatcacttcaacttagaattatttccaggaactggtatttaagtttggatgtcatattaattactctttttatagagcctagtgaggaaagagataaaaacttgaactctatgggctctgcaataagagaaaaaaagtgaaaatgagacctggtcaccaccttaggtgctaaagaaaggactataggagttaacacaataattaattgcctagtgagtgtcatcacacactgataatgtccatatgttaacagaacatgttctgtaaatcccaagaaataataaatactagatgaaaaggcagggaatttaaaaataggatttataggggaatccagaagaattttaaaagttaaaagatgagtaaggagaatgtgttaacaaaacaaaagacaaaatgggagtttagagagttatccacggattaaaaatgtctttatcactacttttttttagtgataacagtaatgggatgctttagaaatttaaaaagactgactgacataaaagttaaactcacaaacaggaattctcatttaccttgctaacagttcaataaggtcagttctgctcataccatcaggaatcagccttggaatagcagcaatgcaagttctaaacaagtcaattttgggttttctttccccgctaaaaaacagattacaagaggacttaataaaatgaatcttacatacatcaaacaatgaaagcaaacttagaaaaattactacagaaaacatgagcccacctccaaaagtttaatgtatttaacataataaaaagagtatacacatttccagtaaataattatcagtttataaatgcaaaaaaatcatatataattaaggaaaaaaacacagctaacaagaaaaaaaggttttcagtaattagtaattaataactaataatagagaactagtaatagataactaataaggacctactgcatagcacagggaactctattcaatactctgtaatagcctacatgtgaaaagaatctaaaaaagagtggatatatgtagatatgtaattgattcacccttctatactcctgaaactaacgcaacactgtaataaatcaactaaacttcaattaaaaaacttttaaaaaaagaaaacaagcataacaaatattcaaatagtaaatattaagcaaattatttattggtggcgcagtggtaaagaatctgcctgccaacgcaggaaacacaacagacatgtgtttgatctctaggtcaggaagataccctgtagtaggaaatgacaacccattccagtattcttgcctggaaaattccatggacagaggagcttggcaggctatatagtccatggagtttcaaagagtcacatatagctgagcacacacatatacatttatattatttattaattgtttcaaataagttaaatctctgatttaacatttgatgtatatttaattattaaaataaataatatagacattaaataacctaatattagttatttttgggggcctataaaattaacaaaaaattttctttattttcaggatcatatactaacaggagttttagaaaacagacattctcatataccactggtggtattgtttgttcttgtctttttcttttacttcagaatatacaaacacacacaaaaataagcatattgtttatgtaataaaatatgtgaaatttggaaatcctggttcttccatatgcttgatacaatttaattcacctgtattttccctagttattcaatgattttatttattcattttaaatatctaaccttttatatactggcttttattgtgctctatatttcaagggaaagccgttaatttatttgacacaaattgtccttcagctgacccaataaaacaatttttatatagaaaagaattgggatgttttaagagtttgggggtcagtatttattatagtggctatgaatctactacttgtttttagtgattttataaatagtcagtcttctcttagctttgtcccaatatgcatgattttacttaccataatttagtcaaataataccagtccccaacagtgtggttcaattttctgttacctgatattaactgaaagtaattgtatagccaagcttccctactagctcttcagcctacaaatcaggatgtaaataacagatgtgtgtcataaccaatgatttcatcacatcaattttgtctaagtctgttgtgattggtcgctatacatctgttactcggttcacacggcaaaagtgggtagctgtgttgattccctgtctctagtggaaaactcaggtgatactggacaaaaatggataatcaaaagagtaagttggccaacaaaaattaaagtacagcaaaggaaaaaggaagtgaacactggaagtgaaattcaaatcaaacattaatggagttacagaagaaacagctgatgagggcaagcagacactgctgtcactgaagatccaacacatgcagtcagaggaactcagtgagggcacattcgtgggcataaatgaggcaagtgtggccaaaaggatgaagatttcccagaggaagtaatgcaaggggaaagaaaacccttcacattagagaaactctcctggggcttgccaggtggcgctagtgggaaagatcctgcctgccaaggctaatgcaggagacaaaagagatgagggtccaacgcctcagtcagaaagatcccctggagaaagaaatggcaactacgccagtattcttacttggaaaatcccatggacagaggagcctggtgggctacagtctatggggtcacaaagagtcagacacgatgaagtgacttagcacgcacagagatgttagcatatactagtatatagcaaccatgcattcattgagagatccagtatccaatttgatggtctaagacctacaaagcagatattaacaccataaaaaattcctcctgtaaaaaatacatgtatattttctagcaagtaaaagaagttgttgccataaaatatatctttctgagaaggaagtccctaacaataaagggaaactctgttttgacaatcagtcctgggagaggggtggagggtgacatgaggtacagtttctcatacaaaaaacttctcatacattatttacctctgtaccctcagttcccaggaggttttcagagttttcttttttgttgaaaaaagctctggaaataacagcatttatttgactatgccccgaccagtaacaccaaagaagctgaagttgaacagttctatgaagacctataagaccttttagaactaacacccaaaaaagatgtccttttcattacagggaactggaatgcaaaagtaggaagtcaagaaacacctgaagtaacaggcaaatttggccttggagtacagaatgaagcagggcaaaggatgatagagttttgccaagagaatgcactggtcatagcaaacaccctcttccaacaacacaagaggagactttacacatggacatcaccagatggtaacaccgaaatcagattgattatattctttgcagccaaagatggagaagctctatacagtcagcaaaaacaagaccaggagctgactatggctcagatcatgaacttcttattgccaaattcagactgaaattgaagaaagtggagaaaaccactagaccattcagctatgacctaaatgaaatcccttatgactatacagtggaagtgagaaatagatttaagggactagatctgatagatagagtgcctgatgaactatggaatgaggttcgtgacactgtacgggagacaggaatcaagaccatccccaagaaaaaagaattgcaaaaaagcaaaatggctgtctgaggaggccttacaaatagctgtgaaaagaagagaagccaaaggcaaaggagaaaaggaaagatatatccatttgaatgcagagttccagagaatagcaaggagagataagaaagccttcctcagacatcaatgcaaagaaacagaggaaaacaatagaatgggaaagagtagagatctcttcaagaaaattcgagaaaccaagagaacatttcatgcaaagatgggctcgataaaggacagaaatggtgtggacctaacagaagcagaagatataaagaagaggtggcaagaatacacagaagaactatacaaaaaatatcttcatgacccagataatcacgatggtgtgatcactcacctagagccagatatcctggaatgtgaagtcaagtgggccttaggaagcatcactatgaacaaagctagtggaggtgatggaattgcagttgaactatttcaaatcctgaaagatgatgctgtgaaagtgctgcactcaatatgccaacaaatttggaaaactcagcagtggccacaggactggaaaaggtcagttttcattccaatcccaatgaaaggcaatgccaaagaatgctcaaactaccacacaatggcactcatctcacatgctagtaaagtaatgctcaaaattctccaagtcaggcttcagcaatacgtgaaccatgaacttcctgatgttcaagctggttttagaaaaggcaaaggaaccagagatcaaattgccaacatctgctggatcatggaaaaagcaagagagttccagaaaaacatctatttctgctttgttgactatgccaaagcctttgattgtggatcataataaactgtggaaaattgtgaaagagatgggaataccagaccacctgacctgcctcttgagaaacctgtatgcaggtcatgaaacaacagttagaactgaacatggaacaacagactggttccaaataggaaaagaagtacatcaaggctgtgtattgtcaccctgcttatttaacttttatgcagagtacatcatgagaaacactggtctagaggaagcacaagctggaattaagattgccaggagaaatatcaataacctcagatatgcagatgacactccccttacggcagaaactgaagaagaactagagagcctcttgatgaaagtgaaagaggagagtgaaaatgttggcttaaagctcaacattcagaaaacgaagatcatctacccagtcccatcgcttcacggcaaatagatggggaaacagtgtcagactttatttttctgggctctaaaatcactgcagatggtgactgcaaccatgaaattaaaagacacttactccttggaaggaaagttatgaccaacctagacaggataataaaaagcagagtcattactttgccaacaaaggtccgtctagtcaaggctatggtttttccagtggtgatgtttggacgtaagagttggactataaagaaaactgagtgctgaagagttgatgcttttgaactgtggtgttggagaagactcttgagagtcccttggactgcaaggagatccaatcagtccatcctaaaggagatcagtcctgggggttcattggaaggactgatgttgaagctgaaactccaatactttggccacctgatgcaaacagctgactcactggaaaagaccctgatgctgggaaatattgagggcaggaggggaaggggacgacggaggatgagacggttggatggcatcaccaactcgatggtcacgggtttgggtggactccgggagttggtgatggacagagaagcctggcctgctgcggttcgtggggtctcaaagtcggacatgactgagcaactgaactgaactgactgaaaccagccatgtccacacacatctggggtagttaggatttatccataaggcctcgtcactgacaacgaactgtatggatcaagggtgacttctgctatctatattgacttgacagcacataaaagggtaaaactgagcctgtgagaatcgctatatcaaaaactgcagcagatggcaataggggcaaactccagaagaaaaagtaagggaacaaacaagcagaatcaaccctctatacttatgaaaactgaaatagcaatgaagagaaattactgactacatacgtaatcatatcttcaggctccttattggacatctgcacactagtcatacacatgggcctcccaacttctttgtccaaatgtcttagaatgctatctaatgcttttctcacttgaggataataaactgacattcctggaggagaaaaaaaaaaaaagctcagttacaaaatgtaaaacattagacatagaatagttattctctgtaaaatataaaaggttattgacttttaattggcattagcttattgatgttacagaagaaattctgactttgacatactcttctccctgatgataagcttcagtatattggaggaaatgtataaaaattatgcacacaactgaatttgaagaaggacaagatgcaatggatagtatcatgtaagaagatattaagagttggacacgactgagcgactgaactgaactaaagaaaatatttaatccaaagtctcctaacatgaaaatttacagatattatagaaaatgtattcattttgtatcactctatatcctggaataacctgacacagacattcataggcaaataaatgtatgtaggcaaatatattcattttagctttgatcataaactttcacaaaagaacattaaactatattatttatttattccagttaacactaacctatgacttttgcttcttcatctgtcaaggttttattgaggaaaattttctttacacgcaaggtgtttcctgagggaaggataactcctgtcgttggcattggcggttcaccatctttttgctgcaaactgtccgctatgacaaggaagactctgaggcctatgttcattctcttcagagaaaagaagtttcaaaataaaaatgtcagaaaattcctcttttttcacgctaaaaacatctcatcaaataacagtgagggatgggaggaagaaggatagaagaaaaatgaacctctctgttcaacattttttaaactagcccaggcattggaatttaacatcaaattcccaagtgccactctttcactctgaggtcaactggctctcctgttttctagcttacttcaaaactctcccattccttcctcagctctactaccctgatactgtaccttcccttctctgagtagacgatttgtctcccacgtcatagtaaaaaaccaatcttcctcaacttctcactacaaagtacaatgatctatttacatctgcaccttttcttcctctcctttgctcttgttacaatcaaggggtgctgatattcctagttatatagaatcctacctgctcttgcattaccaggaaattacactattaaatcattccttctctttcttgcaccttcaacatttcccttttaactgaacatatccgattcctgttcactatactcaactagcataatggaatgatccctccccgttaatacttccctctcactcatcagtgagcatactgctcaaaacagtgggcatttttccttcattctatctgacttttcagcagcatggaacacagtcgaagagttcttctttcctaaacactcccttccttgactatatctgtaccactgggggctgtgtcttatctacccgcatttcagatttaccctcctttacctgggtattaaacattatgctgcttcaaggcaagttcccaggttgtcttttcttaccattatgtgttctctcccaaagtaatttcatgtatttacatgtcttcaactaccactcgtaccacagcacccctaattttaagcctcatttctctgaacttgaacccttagaccaatctgatacttctacttggatgtcaaaaagatgcttcagattcaccatgttcaaaccaaaaggcactttccccacaaactcagtatcttctcagttttttttttttaatgtatttatttgttattctactttacaattctgtattggttttgccattttctcagtaaattatctctctatccaccataccatctcagcccaagctgtcactattcatgacctacaccagtggtctctaaatgggcatatacatcccagtgggtgtgtaagacagttcactggaatacaggaagaaaataaaacttttctttatacatattttttgtccaacatcaaagtttttagctttactcctatctttacatatgacataacgctggtgacattagtctaaatatcaaaaggtcatttcacatagtcatagaagacattttgttaagcatgtcatctataaaaatcagtcaattttgctcactttaaaaatctggaaataattatcaaccatcttaaaaatcctacaaataaaaagcttcaataactttccagctcacttgttaaactactaaatatatacctaagatttgattatgagaagaaccagcacaataattttatatattctccagtgtcattagagtccaataagcaattagttcacaaaatatctttaaacaatctgaaaatttaatatctaaagtgtaaataggagtttactagggaataacacagcaccaaagaagtaggaaataacatttatattaatttgtctttaactaggaatttaagcctaagagttctgattccagaaactatgttctaaaaaaactttttaaaaaattatataggatagtaaattactataattttgttacctctggattaatggtgaaagttttagtagattttccaacactgagaagatcaaatattatttctttcattgcaaaatccaaacgttcctagaaaaaagaaaaacaatcaataaaatcttagaaggttcttctgctatagggatgctttggagatattgtgggtttggtctagactgcaataaagcaaatcacataaattttctggcttagaagtgcatataaaaattatgtttataccatattgtagtctattaactgtactatagtattatacctaaaaaacactgcacaaccttaactaaaaagtacgtgattgcttaaaaattgctaaccatcatctgacaacacagggttgccaccatccttcaatttgatttaaaaaaaaaagtgcaatatctacaaggaaaaataaagcaaactaaataaaacagggctctgtctgtatatgttagcttatcacactagtgaagtgacagtagctcagtcatgtccagctctttgtgaccccatggactgtagcctgctaggctcctctgtccaaggaattctcctggtcagaatactggagtgggtagcacttcccttctctggggaatcttcccaaaccacggatcatgctaagaattatacagacaatgtcaagaatacttgtctgtgaccagaagaagttcctgaatctagctggacaaaaggagaatacgtatgaattaatataatgttaatgggagaaatatcaataacctcagatatgcagatgacatcacccttatggcaaaaagtgaagaagaactaaagagcctcttgatgaaagtgaaagaggagagtgaaaaagttggcttaaagttcaacattcagaaaactaagatcatgatacccggtcccatcagttcatggcaaatagatggggaaaccagtggaaacagtggcagactttattttggggggctccaaaatcactgcagatggtgatcgcagccatgaaattaaaagacgcttgctccttggaaggaaagttatgaccaacctagacagcatattaaaagcagagacattactttgccaacaaaggtctgtctagtcaaggctattttttttccagtagtcatgtatggatgtgagagttggactataaagaaagctgagggctgaagaattgatgcttttgaactgtggtgttggagaagactcttgagagtcccttggactgcaaggagatccaaccagtccatcctaaaggagatcagccctttaggtgttcattggaaggactgatgttgaagctgaaactccaatactttggccacctcatgcgaagagttaactcatttgaaaagaccctgatgctgggaaagactgagggcaggagtagaaggggacgacagaggatgagacggttggatggcatcagtgactcaatggacatggatttgggtagactctggcagttggtgatggacagggaggcctggtgtgctgcagttcatggtgtcgcaaagagtcgaacatgactgagcgactgaactgaactgaatgttaaaagtatatgatcatatatatgtgatttaattatcaaatgattagtttaatacccaaaccagtaggatgtaagttttaaacactcatttaccaaaatcatactgaagatctaagtgaagtaatgtccaaaataatgatgaaaggaagcttcgtgataatagttatgcagcaggcctggagagcaagaaattcaaactgggacagaaaaaactggctccaataaggtaatctccatggaaaaagaaaaagtcaactcagagtaactgacgtttgagaggagctctatagttctggaggaatgctggtgtgaagtgattaatccaagagagtgggtacaatcctagaagaagggatgcgatgaaacggcaaatgttctctgaaccacaaatctaaatcacaatctgctttcattcatgttgctgacacatttctacttatctaattattaattcggtgcttctgtaaatagaagcgtattatttttttaaatactttacttcttcactgtcaagaataatcaccttatgggtcatcttcgttgtcaacagttttggttcaaagagaactcggtgaatatcctggaatcccagtgtttttcctaaattgagaaggtaaccctacctatgcttctccagggctgacgtcacaaaagacaatgtgcttactcagtctccatttactcctcttcaaataaacctgcctttactgcagaggctccaaagctaacgtgacatttcccaggatgcctctgaacaacaggctccagaatgtgagtgaaacccagggaactggggtagaggaggaggagggcagggagaaaggggtctatttcactggtgggatcagggcagcagcgggattctgaagcacctgggggcatacttcctaatctggtagcttttttgactgtggcagaggcagcagcttccttgggagtccagtgttacggtttcttctgtcttgttagtgattctgtaaacaatccatattccttaaaagacccctttggggacttccctggtggttcagtggttaagactctgcccttccattacataaggcacaggctcaatccctggtcaggaaactaggatcccacatgccacatggtggtcaaaaaaataaaaataaaaagaccccattgggttcagctatctacagtggattctagtgtctcacctgagaacctagattaatgttattatgaaaacagtgttccactatctttcaagatactcggggaattaattagtttatagactaaaagtaggattatgagattttctcaactctttctaaattgagtgcttccatttgtgggaatttcctttccttctccaagtgtgtagatcaatgatttaaacatattttgcacacacacaaaaatcaatcattagcctcatttattttttactttttaaagcatacttttttcactattctatattaataaatgttttactaccatgcttttagatgtgtaacaaattctaggagtctgagtcactcttataacttccacgtatatatgtattatgagtcagtcactcacctgagcaatgaactgaataatcttcacaaatatattgagaggtgtgtcacgaggaaccacacttcgtgaacctttcgggaaaagtgctgacactatgctcataagacgactagaaggagaaaagatttagtcatgatgagagaacgaaggtaacaaaacattagcaaaatatccttcccatcctgtcaaggtaattcatatccctcctcaaggtatttttgttaactaaaattcattagtgtggttattatttttttaaccaagatgttatttgaaatatgctttgaaacaaaggcactcacctttgagttacagtgttgctttcacattttattctaattacatagacccacaacaatctatacaaagattccagtgcaactcgagacattttaggatctttattctgtttagaaacaaaagagaataaaaataagcttatttattaaagtacttgcaataaatttaagatcaattatattctatcaacaatcaaaagccctttccattcccttttttattcaatacaaaacaggtttcaatatgtaagtatatgtttagtatacggtaagtagacaaagctcaaaagcaaccattaataagggacttgagtcattccttgtattctcaaaacaaaagagtaaaatactagaattatgtattttctgtgtatatagttcaacttacctgatggtaaatgggtcccacaacaatactgacataatgatgaaagaaaggattattcatctttaccataattcattgcagctcataaacagttaaaatttagaacaccaaatgttgttatagatatttgcacttatgaaacaatgcaaaatattattgagtgattatacttaaaaaaaatatggaatggtgggttaaaagcatagactctgaaattgggaataactagccaaacctcatccttggagactgttacattgtttggtgaaacagtttcctcatgtctaaaatgtagattagggtacaaggtaccccgtacctacctcacagattaaggaagttattatattatgtgaaaagcacttggaacactgcctagcacatcttaaatgcctagtatgtgtcaagtgtttacccttaatttttagtttagaacaagaacattattatttaaaatgagaaaagcacccattttgatcacaatttggtcaacaaaccttttcctcatatgagctattataaaaagtgaagttctcaaatgacaagtcatgtagtgggagttaattgtaaaatttgaaaattagctaataatcatctttattaggagaaattctttatgcatctgttaattataatgcatttagtcctataaattagcatttatttaatttggcttgagggatttgctattgttaaacaattattttatatgtaacaatggacaaaagggactttttaaatatgaagtagctgagccattctatcttatattttctcagactacagaataatagacatctgttccctataattagaagcaatgcaaaaaggttactactggagttgttttttaaaaagacaaaaactaggggggaaaaaaatagggcttccctggtggctcagacgataaaatctgcctgcaatgcagcagacctgggttcaatccctaggtcagaaagatcccctacagaaggtaatggctataattttgcatatctatgtatatgaagatttgatataattcagaggaatatcaactattcagttggtcagagtctaaaaatcagtcttttcctctactgtcaaatccatgattccaaattttatatactccccaagtagttttttaattaatttgttactaatataaagtaacatatatagttatacacaatgtatgtttctaatgtaacaaccaagatttctgaaatactttcttttctagcacttaaatacaaggtctcaggtatcaaaataagagttcagttttgggcttccctagtggctcagaggttaaagtgtctgcctgcaatgtgggagacccaggttcgatccttgggtcgggaagatcccctggagaaggaaatggcaacccactccagtattcttgcctgggaaatcccatggacgcaggagcctggtggcctacagtccacggagtcacaaagagttggacacaactgagcaacttcactttcacttagttttaggtacactacaaataatactttcactttgttaattatattttcaaaatatgaatattataaatcaacatgtaataaattatatattaaaaatctaagtctaattcacataaaaattcttctcatataacttagaatatcttatatgctgagacatctgacatgaaataaaatttgattttcaaactttctaagatggactactgtgttttaaaagcagatttattttataaagaacaatgccaaacaagataaaaagtaattaaaaatcatataattgtttatttggtcaatgaaatgctgctatacatgtctgaataatgaagacatcgtcagttaatctaatccttaaacaaagatacataattccctagatacagttctggtctaatttgaataatcagattacattaataaagtccagttttattaacatataataaagttttgatatcagtcaaatatgctcttggcagcaatcattttagtgtttcttcaccttttcctactatgaacaaaaacaaaaaaagagatttacttaaactcaaaccagtaggattgaaattttaaagtgttgcatcaaaatcatattcagtctgagttactgtccccttaatttcattggaaaatatttttaaaatatcatttatttaaaaaaaacacactatataaaaaggtatcataacagctaacataaactaaatagaatatattaaaactgaagatgatggctaaagatcagtactcggtatcatatctctctattaaattcatcttcttggggccacattaatattaaacctttggtagaaagttcctgctgtgtgtgcctcttcttttacaacacaagaagcaggtttgaataaatacattggacatgcaaggcagcaacgggtaaaggggggaaaaaagccacacttaaggagataaagcaatattttactttgtaacatcaacacgactcacctggagagtttctatttgttttctgatactgttgttagatggcatctaaataaagcaatgtgagacagcaaacataaacatgagatgcggcacatgcatgttagatgaaaataagcacaaaacaagacagctcttcaccaaggtctctatttagaagaaatttgaaatttccaagacagtggctagaaacactgagggaaaaaaattctataatttggacatcatggatcatgggatacacctacaacactgaagctgagagaaaatagttaaaattttcaactgtctaatttttcctctaaaagtacagcatttaattttaggcaagttcccatttttaaaagaaaagaagcatacactgtagaaaaaatatttcaattatttttatatggcacctactcttattcctctctttcttattcctcagaaactttaaaatcatttttcacataatgacctcaattgacataaatacaggggcatgggaaactaccaaatcacatttgggagaaaaacagcagatttaacattttcagtgaaaataaactgttgttctctcatgcttttatggacctacagattaatggccatttttctggtcaccaatttaaaaaactagtatgataatttttaaaaaactgtgcactattttaaagtaccttgaaaatgtatatttattcctatgaatctatagaataatgcctttttaataccccagaattatagccaaaagtacatttttaaatatttaagtatagcaatattctttatagtacattatcaggtaacatggtagaccagaaagaacaaaaactatggaactagatggatttagatgcaaatcttatctctattagcctcagttatagtaaaaattaaatgagataccatacttagaaaatctagcctataataaatattaataaaaattatcttaagaagtagtagttctaaaaaaagtgttaaagactactttgagatcaagagattacttgaatctcaaagcaaaatcaatttagggaagaccttcatcttgggccaattttccctatatacaaatcaaataagttgtacctgtcacaacagataactagcatagtttttccctgaatagtcaactccttacctcaactatgcagcgtagccacagtatataaaacttaaaaaggaggaaccaagtcataaaatttctgctgaatagagccttaatgtaagttaagggttaatggtcaagacaactatattccaaatattcatgctaagtggctcttatctcctttagcctggcagattgacacagccattaataaaaatggacaatatgccagaaatgtttaataggaggtaagggttcaaagaaaacagcattttaaatgaaagccttaagacaaaaaaaaaaaaaaagttaaggtactgcgaaagaattgcaaatatgttaggtggaaacgtatatatataaaacattccaacaagcaacagaaaagtatgaattgtcatgaaacaaagcaatcttccagaaacacttaaactgtgtgccttaaaatatgttattataagtttgaagaatcatactacccagaaaattatcacttctctttcagcacctaaatctgtatgaattaccaaaataaggacagaaacaatataatgtacttaattgaacaaaacttattttctggttgcatggcataaagaatttaaccagtttgactaatcctgagaattttcataaataaaacaaagagaatatatcaattctgatccaaatatgaataacatcaatgtatgtatattatggagggaaacagccaaaaatacttctgggaagacctatttttagtatatcttaccaagaaataaaagtatttttcaaaatgatatgtaaaatcatttaaaaaatgtatatataataatgttgcccagtaaatcaatccttaaaagtgagaaaaaaagagccagtcctatttctcacatcatgattagctgttggatcagagataagtcatttaatctctctgtgccttggtttcatcatcttcaaagcttaagattttcagttttaaccctaacttagaggaataacagaaaataaaaagccatgtctacctcactccagtactcttgcctggaaaatcccatggacggaggagcctggtaggctgcagtccatggggtcgctaagagtcggacacgactgagcgacttcactttcacttttcactttcatgcattggagaaggaaatggcaacccactccagtgttcttgcctgcagaatcccagggacaggggagcctggtgggctgccgtctatggggtcacacagagtcggacacgactgaagtgacttggcagccatatttctataatatgtaagcagatattcaaatatattcatttatgcatcaaaacagtattcaaatccagtgttcacatgacattcagatgtagaacattcccattctgtgtcagatattaactgtggtcctgtccacagaagaagagaagatcctgtgagatccttcagcagagtatcctgggaagatccttctacctcatagttttcttttcagactgaacacagatgtgccaaatactgttaataacaagtaattatcccttgattcaagccagaacatttcaggagctgacaggatccagaaccatccttctagatttgaccaggcataattacactaaatgtgcttttagtgatattttatcatcaaggcttttttcatattattcagacttgagcaaacattactgaattttctcagaagaaaacacaaaataacaatttgaagaattttataagattaactaatactctgaaattctaaaggaattaaaaatattaatcattaaaaatatataattttaaaaaaagaaaaaaaaagaaataaaataaaaataaaactatataattttgcattcattaagaccaactaaatttaatcaacagtttattcatgtctgtaacatgattccctatagaagaaatgaagtatgtataagaaaagaaatatggtaaaatatctctattcaaatgaactacagtactaaaagttttattatatactgtttaatatacatgcatgagtgaatgtactacagtcagtatttacaggtcagaaatgagattaagtcttacctttaaatgtgacaaacagttctgtaggaaaatatgccagttatttaaaaaaaactgtttctgactgacacataaaaggcaggtaattaatggatatagagcctaaaggagaggaagaaacagaattaagatttttcataaaaagggcagcactggacttgtcaattatatttcattcattctaataaaaaattctattagcatttttctgtttgtaataaaaaatacaatcagggaataatcaaagaaatgacaaagggcatttcttctgtaagaacaatttcctgacctatcacctctccccaagttagaaatatgctgttatttctccctagacccagtactcctctaactagaacagcggccctgggggtcagagcacagaccaacgttaacgtgtcagctttcaattcatcaggtgactttagggagtgtgtgtgctccagtcactcggaggatccgttaaagtgttggaggtccactttcctaacgtgaaaagtgaggatgctcatcacacatatcctacagggttctgaggcataaagtaagatacagcgtggaaagcactcggcttagtgcctggcacagtcactgttgattattactatacctctatcttaagtggtcaagtactcatccactatttcacattttctccaagctgcatacaaatttacagaaaaatccctcaaagttattgacgtgtacggttaaatggggaaaaaaatcaccttaaatttctgaaaagagaagatgtaattatatagagaatcacatgcttcagaatacaacttattatgatgtaaaattggacttccctggtggctcagacggtaaagaagctgcctgtaatgcgggaggcttgggttagatccctaaactgggaaaatcctctggaaaagagaatggcaacccacttccgtattcttgcctggagaatcccatggacagaggagcctagcgggctacagtccacgggattgcaaagagccaaacacgactgagaaactaacactgacttctcactacatttaaattttcccatattctaatacgggtttcacttgtggttcagatggtaaagaatctgcctgcaatgcaggagacccgagttcaatccctgggttgggaagatcccctggagaaggaaatggcaacccattccagtattcctgcctggaatatcccacggatagaggaacctggcaggctatagtccatggggtcgcaaagagtgagacacaactgagtgactgacactttcactttacatattctaatacaaaattcaaagcatctgtcaaaagctagaataaagtttgaataacctactaaatacagagctaataaaattaagaatatacagttttaaaaagagcaggagaaaataggtaaaatttcctcttgtgtttacactttggatattttacaatttgaatttttataattctctttaaattctactaaaaaaaactctactaaattcataagtcatttattaaaattctaaataaatatgtgaaggtttgaaatgtttctcataccaatgaatgtttctttctggaactcagttcaaaagtagtctgataaagcatctccacaaaatttttcaagcagggaacattcacttcgtttttcacagcctaggtaaaaagataatacaaaaacaaagaaaatggttacaaacgttagatcaaactatacaggatcacaaagaggttctgtaaggtttgaaattggttaataattctctgagtatctaatggaagttccgtaaagtaaataagacaaaccgggtccctgccctgggtgaacaagcagagactagaggcaagtgaacagacaatgaatatgtggtacaaaaaacgctctaagagaaaattctgtgtgctcttagggcactcagaatggaccccaatgaaaaactccatagggaagtaacatatacactgaatccagcgtttccttgcctaaaatacgatcgcatcccacgtaacctctctgaccttatctcccactgccctggccctgcactgggatccagccacactagcacctctgttattcctagaacacatcaaacatgctcttgcttctggatgactgtgctggctccttctgcctaagaaagtctcccccccaaatctggtatgccttgctcctgcattccttcagtttttggccaactgttatcatccctttcaaggtggcggtctttgctgaaagtgaaagtcgatcagccgtgtccaacttttatgatcccttggactatagtccatggaagtctccaggccagaatactggagtgggtagccattcccttctccaggggatcttcccaacccagggattgaacccaggtctcccacattgctggcggattatttatcagctgagccaccagggaagcctgatctttcctaatcattctatttaaaatttcaactcccctacccactgcagcatttttagggccctaccctgctttacatttctccatagtactcaccaacatatctggcatactgcatattgtacatattcattgactgtgagttagctgaactggatgtaagatatataagagtaaaaaagtcttacctaccctgatcattgttctactctgtgtataggagaggccctgacacacaggaagcactcaatacagataatgaataaataagcagaggtcaactaagaaaggaggctgggggttattagagtggtaagaatgttccagacagaagaagctccatgtacagaggcaggtgttatgggctgaattgtcccaaattcaaacactaaagtcccaaccccacatacctcataatgtgaccttataagaaaatcattgcagatatagttagttatatttgcaagataaggtcctactggagtttgtgtgtattggcgggggaagggggtgtgactccaacatgactagtgtcctcagaaagcgggggaaatgcagacatagacatgcacacaaggagaagcccatgtaaagatgaagcacagatcagggtggaacttctacaagacaaggaatgtcagagattttcagcaaactaccagaagctaggtaagaggcatggaacagatctttctcacagcactcaaaaagatcaacctgccaacactttggtctcagatatctagcctctataactgtgagacaataaatttttgctgtttaagccacctagtttgtggtactttgttagggcaatcctagtaggtaaactaaaaaagtaaatatggcattaaagaagaactaggcaacagtaataacggaccacagtcaaaagtctttcttcccacaatctgctcctcttgatgaactgccttgaaaactacagcatactctcagatacctggtaaaaacagattttcagacaaaggggaagcacacatgacgattcgggatggataagcagtaactcaaatcacttctaaggaacaaatatctccaaacaggtaaatacacaaccgaactgtgcatccatacaatagaatactagtcaacaatgaataaactgctgatacattctgtaacatagctggaacttaaaataattatgcagagcaaaagaaaccagaaaagagtctgtagtgtaagattccattagtataaaattctaggaaacccaaaactaagtagaggaatagaaagatccatggttagatctgagaaaaatgtgggaaaaaaaaaaaagaaaaatgtggggtgagtggtagtggggattaaaaaggagcatggagacatttttggaggatggtagaaatgtacactatcttcatcgtggtgaaggttttacagacgtatacatatgtccaattgtacaatttaaatatgtgtagtttaagtcaattttacctccattaagtttttaaaaatgaaatatgtgtgcgtatgtatataaagaatatcattcatacagcagtacatagtaaactgaaagtaaatagcattatcacataccacacacacacacacaaaatccacacaggaagcaaaaaaattctagcatgttaagtattcgaaaatccctaaatcctgtttacatcacattatgttatagtgtatgggcttccttggtggctcagatggtaaatctgcctgccatgcgggagacctgggttcaacccctgggtcaggaagactacctggaaaagtgcaaggctacccactccagtattctggcctggagaattccatgaactatataatccatgggctcccaaagagtcggacacgaccaagggactaatacgcacacacacattagtagtaacgacaaattaattttgagaaatacaatggatttagaccaagaaaagctttcataaatctgtttccctagaagttaccatgatgatgtttataataatcatattttctaaataacttaggatacatattttgacaggtatgatgaatgttatggcaactacagaaatgaacatttaaaagtgagacagtcctgtaaaatctaagatatatgtcacagtacttttaaattcttcagaagcattaaaatggcagccaccttgtaaggagcaaatgccattaaatgcagtgtgttatgctgagctacttgagataagcattacttccaggttgcaaaaacactgcctgttaatggtctctaaatcttaagggcctgggcttgttcttttaattaaaagactgatcagtgttctgctatttgtttaatgaagatttccctacacccacataacattccaagtttccactttattgtctacgagattatgagaaagtaagaatgtatcatctggtaactcttcagtgaacagagactttcaaatacaatgtaaaaataaaaatggacttacagcagctacagggataagaatctccacaaataaaccagcaagtgcatgttttatatctttatcttttacttctaagaaatactgagcacattccttgagaggggaaaaagatatattagattaacaaaggaagaagattaagaaatgataatatcacaataatttcttaaacattctgcaattttattagaaaactaagttcaaattcatgctcaaatttaaaaagaaagttaattcacacttgtgacaatttaacccttggaataaggaattaattcttatcattaattaatatttatcttgtttcttttaaaaaaaagtcatttaaagcaaaaacaactactgttaggctcattccaatcactgcaagttgaaaagggtaggtcacctgcatgaattgaaatgatgcttcaaaatcttctacaggatacattttcactcggaaaaacttcattcccattattaagctgatgacgctttgtaccacatgtggactttgttccttttgccgaagttcttttaattctgtcacaaacttcttcctcacagcctgaaacctttaaaatacatggatacataatttgatatgaattaaaaatattcatctcacatgatattaaaggttgaaatcaaaatgggttttacctaaacaccatctcctttctctgccctcatcaaaactaccagaaaaatacagagatgaaaacaaaattatttgttattctaaatttgctattcatttagttttgcaaatcaaaaatgccttagggagaaattctaatttctaataagaattaggaattccatattagaattagaaattcttattagaattataatttcttattgctgtaataccatcaatacaacactgctgctgctgctgctgctgcgtcgcttcagtcgtgcccgactctgtgtgaccccatagacggcagcccaccaggctcccccatccctgggattctccaggtaagaacactggagtggattgccatttccctttccaatgcatgaaagtgaaaagtgaaattgaagtcacttcagtcatgtccgactcctagcaaccccatggactgcagcccaccaggctcccccatccctgggattctccaggcaagaacactggagtgggttgccatttccttctccaatgcatgaaagtgaaaagtgaaagtgaagtcattcagtcgtgtccgactcctagcgaccccatggactgcagcctaccaggctcctccgtccatgggattttccaggcaagagtactggagtggggtgccattgccttctctgcaatacaacactactaccacttattaataatcatcataaaaataagatctaataacccacccataaaacatccatatgtaaatcagagagtgtctctaaattttaaggttcctttttaatgaagtctgcgatctgagtgacaaggagggaagactgaagctatatatttgtttaatgagataaagcaatcaactgtagactactaattatcactaaaaattattatcttcttacactgtagaaaaactgagtaagaagcatggggggacactggtctcacaatctgaaaaagctagagaatcacaatgctttcaaaacattgagcaccatcttggattcaaattaccccagttgttaaggctactaagtttttctttgtttacattgcaaaaagatatctgatagttcattaatcaataatacttcatttatcctccatatattatgaaacatatatattatgaaaaatacaataaacagattgcttatattaagtgaagaatttactgttaatattacttggggaaactagttcttgagagttaaaatgacaaagcatactacccaatggtcactgattacatattaatattaataaatatagatattaattacattttaatgaaatatggacatatgataggaagtataacttatctatttccatttcagtcttggagaatacaacaccattttccatgaaagtattcttttacattttacaaagaaaatataaagtgaataaaattcctttcattgcaataatattagaatctaaagattttcttctgtcattaaatttctcataataattatcagttactatagtcaaaggaaatgcatagacaagattctgaaacacccctagcctttctctttctcctcactcctttcccacctcaccacctttcctttcaaatggtggtgctgtcagcccaaccaaatgcggatgtgtccacgtcttttctcatgctcactggatgtgagggtggaaaacatctcattactgctcgagtggcatttctctaacaactagaccagcgagtgtgctcaatcgctcagtcatgtccgactgtttgtgacccaatggactgtagctgccaggctcctctgtccatggaattttccaggcaagaatactggagtggattgccatttcctatgccaagaccaatgagactgagcaacatttcatatatttaccttatatttactatcctttattataaacatttttatttactatccttaccatattagatttaacttagctatcacgtaaggttcttctggatccaacttgttcatgtattatttagcatctcctgatagaaaatcattttcattctttatataaatttatttattttaattggaggctaattactttacaatattgcattggttttgcatacatcaacatgaatccaccatgggtgtacacgtgttccccatcctgaaccccgtcccacctccctccccataccatccctctgggtcatcccagtgcaccagccccaagcatcctgtatcatgcatcgaacctagactggcgattcattccatgtatgatattatacatgtttcaatgccattctcccaaatcatcccatcctctccctctcccacagagtccaaaagactgttctatacatctgtgtctcttttgatgtctcacatacagggttattgctaccatctttctaaattccatatatatgcgttagcatacggtattggtgtttttctttctggcttacttcattctgtataataggctccaaataaaaaccaaactatcatgaactacagggccataaaaagaaatatatcattgctcatgttttagtagttatattcctgagacagggattcactgttgattaaatataaatgcaatattaatatattattgtctaagtcatttcaaatactccaatatattccaagttctatagcactgggtatacaagggtctcataaattacaaaggataaaaaaaatactaaattaaaagatgcatgcacactaagtcacttcagatgtgtccgattctatgtgatcttaaggactgcagcccgccaggttcctctgtttatgggattctccaggcaagaatactggagggggttgccatgtcctcctccaggggatattcctgactcagggatcaaacccacatctcttgggtctcctgcattggcaggcaggttctttaccactagccctatctgggaagcccaaattaaaagatagtaaatactaaataaaatgcattacttagtattaaaatctaaactactaaatgctaacaataattgtgtttgctcctttagaatttaaagattgttatataatgatttcagggccaaagactgactctttaaatagcacccaagaaaatctaaactgacccattctgccttacagatttcccaataggaacaaaggcaattcaaaatcttccgcagtctttagagtaagcacaagatatgaaagacaagcatcttttttagtgtttatgataattatggttcaatataatcaatgcatgtaactcctaatgaatgaccctttttatggagcactctagtatatcttatcgtccctttttggtatgtcttctatctattcaaaacactgttcagtattaaaacaaattaagatggttagaaggaagacactgcagtgcatctcagagataaaagcactcaactagaaaccactaaaagtaattattagctttgacaagagttcgaaaaacacttctcatagaactgtgaaacatagggaataaggtaatgacctgacaatttttggcaatttctgacttccttaattcaggttttatggaaaataccaaataaatgaaaacaatttgtagaactgaagtatgggtgtcccttaaaaatcctctaaaaacacagtagcaaaataataaaaagtgaagccaacttcacaaaattccatggaaaacagaaataacagagaaaagtagttagtgtctattctgtcagtcagtaatgaggcattctaaaacatagcaagatcagtgatttatgaaacttactttgattgggcaagaacgcctatcacttctgcatataaatctgcaataatatgcacattcccagtgttggttcctgaatatctaaagcaacaaaaagaacaaacacattatttcattgaactgttctacaaactctcttaataaatctgaaaatcccttatcagggtgttgtataatttttctctgaagattcactggcaggatgataaaaaccacatgaattttctcctatctctacattttaatttgccaggaaatttaacctgattcttaaaaatccaatcaatggctttaagaattatttttacaaaatcctttccataagcatcttgtgtggattaaaaaatataaaggcataactactttgaactccagtaacaaataattgaagaaaattcaaattaacagtctaagtctagactgcagataaaagtaacaatgccataagtattttacttacccttccttatgtttaaagtgcttaaaagctaagtttagaacttcatgaactaagggatcaggcacaggatgaacaggaatctaggggaaaaaaaattgtgtgccaaataggttataagtcttttatgagtattctcatcatttcaactaaccaaattaataaccaattttaactttcatgatattatctactattaatctgtcaatcttccccttttctaagaaggttattatttttctctaagaatttagttgaatacctactttgctgttgtttagttgctaagtcatgtccgactctgtgtgacctggtagactgtagcccaccaggctcctttgtctataggactttctaggcaagaatactagagtgggttgccatgccctcctccagggggtcctccagactcagggatcgaacccacgtctcctgcattggcaggtggattctttacaactgagccactagggaagccttcaacatctacttcaacaagttctaaattgaagaatgttagcttcataaccacaaacccttaaactacagactatgcagatgaaaaaacagtcattgttgtactattctctatcagaaacttaaaaacgcactccagggtaactctctgtgacacctacaggaaagggagcttgattgagccaggtccatattccacatagtctgatattctaccataatagtatccaaaaggaactccaacttcaagcaatttaaaattagttatggttttactagtattagaaattgttcatttaaatgtttgtttcatttagttatttaaaaattacatgttagttccgagtatggaaaacacatcaaaacattaaaaccagaaagtaaaatccctaccccttaccccacatataatcaccactggtatatatctacttgcaggttttttcctacactcacccacccacacaccttatttttacttaatggaatgatgcatcttcccctgtcattactgagcactccttacactatttagcagccatataaaactctgcgtatattataatttatttaatgagctccctattaatgaacatttcattccagacttttaatattatacaataaacatcttatgtatttagtattatttactttcatagttccatgggaaagagttcaaaaggaggaactgatgagttaaagattatccaagtcatcatttacagagattctagttctttatatgttgggggtctgtttctaacctctctattccatcaattaattcacatctatactaaaatcattctgtcttaattataagagcttactactagattctgatgtctggcactgcaaagcctccctatttttcttccacaacagcttggctattgttctttcctattcaatttagagccatcttttctaggtccacaaaaactgtctgttacagatcaatttggggataactatattcttatacatttgcatgaaatatcttcccacttctttaaagactttcaggaaagctttacaattttctgattttgccttttgttattcttaagacaataaacatatgaagagatgcttgctttcatcagtaataagaatgaaaatacacaattcagttcagtcgctcagtcatgtccaactctttgtgactccatggactgcagcacgccaggcctccctgtccatcaccaactcccagagtttactcaaactcatgtccattgagtcagtgatgacatccaaccatctcatcctccgtcatccccttctcctctcgccttcaatctttcccagcatcaggatcttttcaaatgagtcagttgtttgcatcatgtgggcaaagtattggagttttagcttcagtgtcagtctttccaatgaatattcaggactgatttccttttggatggatctccttgtagtccaagggactctcaaagagtcttttccaacaccacagttcaaaagcatcaattcttcacaacaaactgtggaaaattcttaacgagatgggaataccagaccacctgacctgcctcctgagaattctgtatgcaggtcaagaagcaacagttagaactggacatggaacaacagactggttccaaaccgggaaaggagtatgtcaaggctgtatgttgtcacctcggttatttaacttatatgcagagtacatcatgagaaatgcagggctggatgaagcacaaactggaaccaagattgctgggagaaatatcaataacttcagatatgcagatgacaccaccctcacggcagaaagagaagaactaaagagcctcttgatgaaagtgaagaaggagagggaaaaagttggcttaaaactcaacattcagaaaactaagatgatggcatttggtcccatcatttcatggcacatagatggggagacaatgaaaacagtgacagactttatttggggggctccaaaataactgcagatggtgactgcagccatgaaattaaaagactcttgctccttggaagaaaagttatgaccaacctagacagtttattaaaaagcagagacattactttgccaataaatgtctgtctagtcaaggctttggtttttccagtagtcatgtatggatgtgagagttggactatatagaaaaaaaatacacaaggtatcattttgctcttacctgatgggaaaaaaactaagcctgacaataccaaattgtagaaataaggtaaatgaatgagggctcacaaacactgctggtcaaactttagatcaattttttacatagcctgcaatctagcaaagaccccagtgtgtcaccacaaaacatggcccttgggcataaggattgttttaggctgaaggcaagagagaaagaacagacgagggaaaggactctgttcctcctttctccctaaaagcagcctcctctcttccttttccctaaccaagaagaggacaaaccactgtcactagaaacacaaaggaggcacagagatggagctgcacaaagaagccttactaagtagtccttatttcccattggcttcccccatgtgtttaccttcccatggtttaccatctctaggagcccactctcttttccctgtcttgtcacttctccacaatgtactgatctttgttaaaacaggttttcgggttgaaccattctttgagtcttcacttcttttctgcgaaggcctcgagatgtatatgtagtaaaccttttcttctactaagcttacttctatcagtttaatctgtaggccccagctactaaacctaagagggaggagctccattacactagcagttacacacattataagaaaataaggatgtttagctacatacttcataggatgataatttatccagtctgtgcatctcagggtccaattagaaccaaatgcacaggaattctttatgtttgtttaaaattctaccagctgagctaccagggaagccttaaaattgttaataatatagtttataaaacacctcatcagtaagatgaaattgtaataaagattaaatataaccaagaaagtcacaaactagactggggataaaaaaaaaaggattatagctactcagagattatcacaatgcttctcagggattagataaagaaaagatttatatttacaatgaagataacttatttcttacaaagattaaccatgtgcttatcaggaggaggctgcatttcagccttaataatgatcaagaactagttcaaaagtggtggatacaagatagacattagataagaataaagatagttaaattacaatgatgggcaagaaatccagtaaggaactattagtttacatttactcactttaaggagaaggtgaccaaattcacaccaccaaagtaagtagagcactgggatttttttatttttttattggaatataatgttgtgttagtttcggctgtacaatgaagtgaatcagttatatgtatacatatatccccttcctattggctcagatggtaaagaatctgcctgcagtacaggggacctgggtttaatccctggatcagaaagatcctctggaaaagagaatgacaacccaccccagtattcttgcctggagaattccatggacacagaggagccttgtagctatagtccacggggtcacaaaatttggacacaactgagagactaacactttccctccctcttgggcatccctcccactctaccaacaccctacccttctaagtcatcagaaagcaccaagctgagctccctgtgctatacagcagcttcccactggctatctattttacgcatggtagtgtatatatgtcaatgttactctctcatttcaccacacagtactaggattttcaaacactgtctcaagcagacagaggcacagcagctgacatggctctaagaggcttgtggtgaaccctgactccagaaccaaaggctacagccaaatcttggctaagtggctcagtgtttactgttgaccagaagaaatcagaaagaacatgcatctgaaatttcctagaaatgggtactgtcctaaaagcctggacttaaaattcaattagaagaaaatgtactctgagggacacccccatgctatccatcatataaagggctgagtaaccagctgtgaacaaaatctttcaaggtctcagataaccttttaaaaataacctgaccttacaagaaagaaatgaagtttatgcatcagtttgtagaagctgagattttcaaataccatgctaaaaactgtgtgactgcatgctaagttgcttcaatcatgtctgactgtgcgaacctatagactggtgcccacaaggctcctctgtccatgggattctccaggcaagaatactggagtgggttgtgatgccctcctccagaggatcttcccaattcagggatcgaacctgcctctcttacatctaacctgcattggtaggtggggtctttaccactagcccatggtaacaacagaccaggacctaaatttattctacatagtaaagtcagagagctcagcctccagaacagtcttaacctttctctcccattggtaaactgaaattataaacccaaaattcctcttgcaattaggaatacttttaagtaggaattttatgactgactgcattataagaagctttccaatcttttataggcaaacacatcccaccattaaagaagcataaggttaataaccacatctcattgatataggaattttggaatattggctgggctattaagtatgatcttggcatggtaatcttttacgtggtaccttgagtacttcttcttagggctccacaattcatctcatattaacaatttattgaccagagacatattaatattcacttatataatcaaactgcagaacaggagtttgcttctgcaaaaatcccccagtcaataacaaaacaaaagaagaaactaaaaccagtaactccaaaatgctcccttaaattcacaccaagctgctcaacttattataagtaaattataatcaaatcattttatactattgtaaaatattttcttcattaaagtgataaaagatatctttctacactttttatcactctaatgaagaaaagctgagcttttctattcactagttatataatctggaggaagtttccacttttttacctgtgaaaattgcagataatagattagagcccgtaattaccagaacagagatttaaaaaactgagagaatgcattacaataggagattgattcttgtccttgcactttttctacccttctataaaaaggactaggacaaaattcttacctcctaggaaggtagggcagatgagggaactagaacataggatggagacaccgaggacaaggccttgtagggaaaaatggcagtaatccagagttcattaggaaacagggaggcagatgtattctcctagccagatcttccccagactgagccaaacaaaatatgcccaaaggtaactaaaaggttcctgaagtcactgctattgtcccctatgtcccagttgttgttatacagttactaagtcatctccaactcattgtgaccccatggactgcagcctgctaggcttccctgtcctgcactatcttctggagtttgctcagattcatgtctattaagttaatgatgctatctaaccatcttatcctctgccaccctcttctccttttgccgtcagtcttttccaacatcagggtcttttctaatgagtcagctcttcgcatcaggtggctgaagttttggagctctggcttcacctttggtctttccaatgaatattcagggttgagttctttttgattggtttgatctccttgagactctcaagtcttctccaacaccacagttcaaaaccatcaattcttcctcaatcagccttctttatggtccagctctcacatttgtacacgattactggaaaaaccacagctttgactatatggaactttgtcaacaaagtgatggctctgctttttaatatgctgtctaggttggttatagctttccttccaaggagcaagtgtcttttagtttcatggctgcagtcactgtctgcagtgattttggggtccaagaaaacaaaaattgtcactgtttccacgtttccctttctatttgccatgaagtgatgggactggatgccatgatcttaggtttttcgaatggggagttttaaaccagttttttcaccatcttctttcactctcaagaggttctttagttcttcattttctgccattaagtcccagtaagccatctgattaacccatcactggttaaaacaaagtagatatctaccactaggtgacgccaacctttattcgggaatgggctgtatatggatcaagcagcctgactcccagaacttcctgtagagctcacagcgctaatcatacaggttggagccagacacatcagtgaccttgcaataatgcgacactacatttgacaggaataaaatttcctgtgccccactcactgtgcggtggtgtggttttaccataatgacttcctcacagggatgtctggtgtgctctaggccagagatatgaaacagaagctaacttatacccatgctttctcttacatagtctttactggctccaattatgccagaagtccaacagtgacagctgggcacactatttggccatgttgtgtgctctctcagttcagttcagttcagttgtccagtcgtgtccgactctttgcgaccccatgaatcgcagcacgctaggcctccctgtccatcaccaactcctggagttcactcaaacttacgtccatcgagtcagtgatgtcatccagccatctcatcctctgtcgtccccttctcctcctgcccccaatccctcccagcatcagagtcttttccaatgagtcaactcttcacatgaggtggccaaagtactggagtttcagctttagcatcattccttccaaagaacacccagggctgatctcctttagaatggactggttggatctcgattactaccttaatactgaactaccaacactttccaagtgtctgtgtgctgggtatttgccaggcattttatatacattatttatgacacttatagcaaccttacatggtagtatttgacccctgttttgcagatgagaggactgaaatttagaagttggagcatacgtctctaaaatatactgtgtgcccagcttctgatcaatgaaaatacatttaataaatggaacaaatgaggaaaaaagctttcagttttatcacactgtagctagaaaagagacagagaaacagaagtgagagaagaaacattatctcagttttaatttttataagaaaaaaagcacaatctctaaaaattttaagaatggacactattagaatgctcagacagtcttgaaatttctacttttcccccttgcttacaataacaacaacaacaaaaatttccaaactgaatttccaaaaaggggggtggggggtggggcggaatcctatttcagtttatagaaaaaagctctatttcatggagtaaattaatagcctcatctatagtatcaagaatttttcaaatcttgtcatttgcatgactagaagcagctcaaattctacttgaacattcaagaaggatatatcgagtagaatctaaagaatactcaagttttattccaaagctattccctaaatctaatgcttttagcacatcatgaaagtggaaaaccacaaaaccaggtaagatatatatacctgagagtcagcaaggttcattcattatgtaaatgaccagtcctcaatgaaaaagtgaataaactcatgactcagcaaaatcacaaataacatcataacattcagggctgctcactaacgtctaaaatgtcaatgtgaaatctgaaaatcctaaggatctactactccaccttctgatacttcacaataaggattgataagactaagccaaaaatttgaagtggctcataggcctgggtttcctaatcttgtctgtttcaatgaacaaatgtatggctaaaattcagtatgaaaaaaaaacttcctcaaacattctaaatgctacactgctgctgctaagtcgcttcagtcatgtctgactgtgtgaccccatagatggcagcccaccaggctcccctgtccctgggattctccaggcaagaacactggagtgggttgccattcccttctccaatgcatgaaagtgaaaagtgaaagtgaagttgctcagtcgtatccgactcttcgagaccccacagactgcagcctaccaggctcctccgttcctgggattttccaggcaagagtactggagtggggtgccattgctttctccgtctaaatgctatggtgctgtttaaatatgctttttatcaaggattctaaagcctctggtattaacattctaacatttgtagttggccatgaccccaaaattattcttctgactttcttgaaaaaataaaattagtcctttatcatcttgatttaattttgttcccatgatgtatcacattgatttaaccagattttttcccatcacatttatataatctcaatcctttgtctaacttatgatttaaactttaattttataagatactggtcatttcacctaattttatatcactgattttaccaataagaatagttttatttaaaaagagaactagctttatcatcttcagcaaatcattgtaactaagaacatttatctataagataaaaacaacagatagcatttattggacacttcccatgttcatattattgtatctaattattgtatttaattctcatgattcttttatagaggaggaaagaaatcagtgagtaataacttgtccaagttacaaagcaagtaaatgacacagctgggatgaaaaaacatttccaaagttcatcagaatgatcaggtggtggagaaggaaatggcaacccactccagtattcttgcctggagaatcccatggacagaagagcctggtgggctacagtccacagggtcgcaaagagtcggacatgactgagcgacttcacttcagattagtggttagagaaggggcctccttattcccattttcatgatgacctagtttctacttaattgacctaatgaagtcataaatttataatgacatgaattatagtaaacaatagaaaccacccacttttgtattatactatcaaatagaaaacgatgagatagaaaaatctaaattttaaatggcttagaaaatgttcagattatctttaaatttctaaatttcatctaatttctaaaacagaaaattataggtgaaaattgtaggtgactcatacatccgttactgtttttcaaagtctcaagtttccttttaatatatgtatttatttttgttaaagcagctattttccaacctgtgactttggagatacacccataaaactaatatggcatcagggttattgaatcagctttgggtcccagaagttgcttcagatgtgcacgttgtcaattttattgtatctgtagaatataatttttgttttaaactgtagttttctcagaaatacttttcaaagagtgaaaaattccaggataactgcttctgtgtcaattacacttgacacataactgcacaaatgaacaatgtacactattagttgtacattaacttacatgtacgactttcggcatctgtgttcacaaatgcatgtttttgcaaatcaccgttatttataagtgacaataattgaggttaaggttacaaagaaacctgcatttgtagtccagagttttaagtggtccataatacaatgtacggaaatgtgaaagacaattttgtatatttgtttgttactaactcagatcattaaaatgaaaacaattttttaaacaacaacaacaacaaaaaaaaaagatcaggtggtataagggatacagagctctttgtgtattgtgaagagttctaaatatgtgattatgacacataataacatgtgataacgacatgacaaattaataaagaaacaaacaatttgtaatatatgagatcaagcactaactcacaaacaacatgtactcccctttcaagactgacccaaccatgtatcgatatttcattacactccaggttactcctggagccatccatctcatcaaaataaaactgaatcacatgttaatacatatatatcatgtgggacaaaagtaatagtcatattaaattcaaaatatactaccattgattactctctgaatctattaaaccctacatcattttgacacagaaaaaaattgggttcatttgtcatgatagttcagaaagctctatttttacttcatattctgtagttgcagtaattttgaagaagctaaaaagacttgcattttactgggaaagagaaaacctatataggattttaaataatgaacatcaaaaagatgcttgttccttgggagaaaagctatgacaaacctagaaggcatattaaaaagcagagacattactttgccaacaaagttccatctagtcaaggctatggtttttcctgtggtcatgtatggatgtgagagctggaccataaagaaagctgagcgccaaagagttgatgcttttgaagtgtggtgttggagaagactcttgagagtcccttggactgcaaggagatccaaacagtccattctaaaaggagatcagtcctgaatattcattggaaggacagatgctgaagctctaatcctttgcccacccaatgcaaagaactgactcactggaaaagaccctgatgctgggaaagattgaaggcaggagaaggggtccacagaggacaagatggttggatggcatcaccaacacaatggccatgagtttgaacaagctctgggagttggtggtgatggacagggaagcctggtgtgctgcagtccatggggtcgcagagtcagatgtgactgagtgactgaactgaactgatgcttttggtatatgtttctttgatgagtgcatttgaatgaaaatatgaggataatggtaaaagagaaaaggggtataagtacaaaagaaaataatataacactgtaaagaaactgtactccaattaaaaaataaaatttttttaaaagaaatgttaagcagaaagggaactataggttagaagagtatgataaaagaacccaaaccaaggatgagctatgagaaccactgtatttcccctttttatactttgtgagtccacgtgaaccatggatatgaaaggattttgtgcagaggactcgaaaaatgggcctgaaaggattttcttaggtttacagacttcgatttttttttcccctactagaagagttatctggactattagattttttaaaggagcagaaggaaaaggaagatcaagacaaagacaacagggaagggtaaaaggacagctgagaaggaagggtaaggggagaaagaacaccctccaagggcttgtctgtgcactgaagttctgaagccagtgcaattataggtaacttttagatgagaagagagaccagttgctaagtggaagaccatcatggcaaccaaaggagaaaaggcataaacgagtcagagatcacggaggggcctgaaagtcagtgcacgagtttgcgatttctttggctgggagaagaaattcctctatcattcaactaagaaatgcaaatactgatgactaaattcgtcacaagatctacatttagcatgagatcaaccttgatggggcttcccaggtggagctagtggtaaaaatatgcctcacaatgcaggagacataagagacttgggttcgatccccggctcaggaagattccctggaggagtgcatgacaacccactctagtattcttgcctggagaaccccatgcacagaagagtctggcatggtccatggggtcacaaagagtcggacacaactaaagtgacttagcatgcatgtaactttgatgaacgcaaagcccaagtctgttcatggtatcatgcttctggtcctcagctccttctatatctctactgacttcagccctaggatctaggatccagctaaactaagagatcacagaaagcaaatctggctttcagaaagcacaactttcagaggaaacttctttcccacattgactaaataaatcttcatgaaaggtacaaattaaagtgattttacctttgattaatgcgtttatctatttcacatattcaaagttattaaacttttattttaaacaaaataaaacataagaaaaatgtatttttatccgtgggtttcagatattcagatttcaatattttttcacatacattgtaaaaacaaaggcaaagtacacatgattacacaattcaaatatttttatagtggttatgtcaaaaaaagactatcaaatcaattaacttttcatatcttacacttgctttttcatgtcatgttaggtattctattccattttatacaacaaaaacaaaactccctgtccaaacgtgtcatatgcaaaatatgatttctttttcttttaggtgacctgatttttttcttttcccaaaacattacagcatgcatggctggaaaatacatgggtcatctttgaacgctgtataagtttttaaagaatacaaactatggaaaacatactttcacatcagtacaggcacttatacatgtacttgtacttatcgtgaatagtaaaaatatgtgtaacatgatagctgacactaaattacatatttatatcttcactatctatgtcactgagatggtgagctcagaagtgcagtacctagaacaataccacccaacagtagacattctaacacttattgaatgaatgaaagtgaaagagaaagtcatgtccaactctttacaaccccatggactgtagtccatggaattttccaggccagagtactggagtgggtagccttcttctccaggggatcttcccaaaccagggatcaaatctaggtctctcgcatttcaggcagactctttactagctgagccaccagggaagcccaagaatactggagtgcgtagcctatcccttctccagcagatcttctcgacccaggaattgaacaggggtctcctgctttgcaggcacattctttaccaactgagctatcagggaagcccgttgaatgaacaaacataaataattcattatcctgaaaatcatttgcacttgacagttcagatcacccccattgctcaacaatcactgcacaattattacatgttgaaatgcaggcttgagggctaggaagagaatttctttaaaagtggaggtaaaaaggaactgaagtaggtaaatgacaggcagactatagtgacagctaaaacctatatttaacacagtttctattcagctccattttactaacatgatttcatgtcttagatggcaaatgaaggtagaaagaatagggagagacaggtacaggacatgcaatcctcaggcaattgaaaggcataaaattaaattacaggaattgtgtttctgtgagccagaattttagatataacatcctaaattaggtaactgaaacatgaaagcaaatcagtgaaaaataagaaatacagactttgcagaaacaaaatagcttacctgctttagaacttcaactaaaactagacaaaaaatgaaatctactgctaagtctctcctttcaagaagatagtctctttcacgttgctgttcatccctgaaacaagaatctcaaattaggattacgttatgaaaagagctcttggttagtatttcatgttatttactgaattcctagtacatatggtgtttcatggcaactgttaagtttttgtaatcacccaacatatatattgcatttcttgtgttctcattttgtacattaggaacttacatgcaaatctcactactacatctgtcagaaattaaacctaatctaaaagaattagagggactttctggtggctcagtggttaggactccatgcttccagtccagggggtatgggttcaattcctggtcagggaactaggatcccacatgccaagtggcacagccaaaaaaatgaatagaatttataccctactgttgtgtgaaaattgtataaatcttaattatgttgaataggttcacagagcttttcaggcctacgatatccttctacttctctgtatattcattctgttaatttttagagtttgatattgaaactccaactaaaaatcttatctacttcaaaaaattattgtaatatataatggaacgatatataaccttgttctgtattttccaagtctcctgtaagtgtgttatcatatgttcgtaatttaaaaaaaataaaaattaaacatacaaatggaaaatttttaataaataaaaccatattttaaaataaaaaactaaaagaataagaggaagaaaaatatgaaaatacagtgccaggtcattttttcacaaatctaagttggaaaatcccaagtggcatctgctgaagtccaattctaaaccacgggccatcatctgaaaacaaacatgttttacttaaatccatgatctccctgggaaatttgaagaaaagaaaagacaagttcaaggatttaactccaagaagagtctcaagtgtaagaatataaggtttgagcagtcttccaatatcacaattgtttcccttcacaaaccatatgaacaagactttctttggatatttttctaactttgctgatgactgctaagctcctcattgcaccagagacagctttcttgaaatgcattttggcaagactagctccagtggcgactcccgtagggcggcacctactttaactgctaccttcacttgattcacagtttaagtgtgagcatcttttccctctgttacctgttccacaaaagtaaccaaacaataacaatcatcagctgataacactatagcctcttcattggaagtacttcaagcccagacagaaaagtcaaaaaatgtgccacttaccccttagattttgtgctagaccgaggcctatattcatacgattcatcttcagttccgttctggcgtttgtaccagtcaaacaaggtgcggagtaaggaagggagacagtgctctgctactgagctcatagagcttatcaactgaaaacacaagatgttgccaaagataaaatacatcaaagtgctgcgcttctaactctacttgcaatcacttagaaatgagcaatatttctggaataaattaacatgaaacattgtaattcaagagcaataactgtgtttcaaaataaaaataagggctgggagtctagccaagtaataaagtatagtgagttacatttcactgactattaaaatttacccaaatctttgcagtttagttcagtggctttccaccctttacctgcctccatatgctactcgtgtaaaaacatgactgtcagtaacatccctgattatattcatgacacctcttggtgaactgttacacacaacatgaaacaatcacacctatttccttttcctggccagttcctctctactcatgtgaatgaaatgttctaaaatgctaccactagaagggataaagagatgcagaaacagagaagaccataccagttagaactatgggaaaagctccacttgcctctgtgctgctatgacacagaacagagaattataattacacaatttgtgatactcacaaataaacatattagaaatgagttatatacatgcttttcaagctcaaaatatataaatggacagcataaaaataaatggagtgggccggatgcctgccactcaatttgaggcatcccttaaactatctgaactgtaggttagctttatcagattcatttcatgaatgaacccagcttgcctgtaatggtggtaagaggtacaccagctaccattagtcatccgtaaggtcactcttcatcttgaggatccagagaaaaaacatattcttttcataagaaactttgtatctgattcaatccattgttcataaaattagtattttaaaattagcgtacagtgaaacatgcttcactttgtttgagttaactaaacaaactaccggctgcagggatactcaacgtctcactcagttccacaactgtaggaagtgtcagttaatgaagataaatggctacctctaggaattaaacatttatttttcctaatattttaaattttcctgtaacaaagaatgaaacaggttgattgtgcattcttctgtctttttataatctgttcctttaatcacccatttatgatttataaattatcataacctgacaggtgaatagtttctaatctagaaaattaaaataaaaacaagattctaattttatttaaacattttgaaattttatatttcattaacaatgaatactatcaatcaaaggaaatctcttaatatttaaagaaggaacaataaaacatcatctgctactgtaaatatataaaagcagtttatttcacacatagcttttattgtaaaaaagaatcaagctattgggcatgataatttagttttattaatcatttacataagaaaagaaatgaaaatttccttaaaatatggcttaataagtttaaaattctgatcattcattcatcatcagttaaatagattcaagatttgaataatctaaaatactttagattacctttaaaatattagtaatacattaataataactagtacttagcatcttctgttatggcattaacatttgaaaagggctgtatgaagtgatcttattattaccctaacaaaagccttcttatttatagcttcctcttagaccagcagctatttactaagtgtatgcatcagaatcacctagggagttattgtaaaatacaggtgccagagcaccactcttggtcagcagaactggagcaggatccagaaacacagtattttggtacgcctccaccaagtaattctaaccagtcatctctatctagtcaagcagactaacacgagcattaacttctatttcctagatacctaattatgggaaaagtagctcaggaatactaggtggcaacagaaagctgatctcggttattgagttttgcagacaatcagtatatggaaataattattgagcagacataattatgataaaaataacacttgatcaaatattcaatattagcaagaggaaagaactgacattagaaaaataccactaaattttagatattagtattctttataaagatttctggtttggggattattttggggttggggggggtagccattgtatattttctttttaagcttctttggctttctaacgcaggcattccccttgatctctgcacaggcacagctacaagtctgagtacagggggtagtcagtgcctcctaggacaacccacaactgctgcagaggggactgcagataaatgctgcagccctccattcatcagacagacaagtatgggcaacattctcgagagctctcagaatggaatgaacccccagtgcccagagcagtgatctctatcaattcttccttttcccctgcatcactctctcaagtctcctccctagaatctctttctagaacccagtccttgtctctggctctgcctttagaagggggtggaaagggagaaaaccaggctagatgcctcaatataaaggttctgaagccccaacaggaaaaacagtaaatgttaagaggtcaaatatgtaaaattgtatacaaggaaagattgagagatataattggaaacctgaaaattttcaaagggcacagtaaagagagtaccaatgaaaagcaaagttttaaaatatttaataaacagatatcaataaagtttacagctcataactcattctatttgttttgttaaaaaacaaactaccaaggaattccatggcagtccagtggttagcatgccatgcttccaacgctggtaacctgggtttcgtccttggtcaggtatctttgtgtgtgtgtataaaatatatgtatatatttatataaaacagactctcagctccagacagaatctagtgtataacgatatatagggccactaatcaaaatatagaaatttcttaatactgggtgtatattggatcagactgttaggataaacattttcttttcaggaaaaaaaaaagaaaaaaaaatactggcatacctggtcaaactgaagatcttcacccctctgaagagatctagataatggcttctcctgcagttgaaaaaaaagtgtatgcaaaatattagaaattttacatatattaaacagttgagatttataagttggttttgctttctttgtaattaattttcttttgtaattaattagttttaaggaaaggtgctaatgtgctaatacaaacaaaatttaattaatttagaagagcatacacagcgtgaccctttctgttagccttactatctacttttcttgcttcctattcctcatagaattatttaacttactgaatgtgagaggtgtctcagattatgttcaaatctattacaactgattcttttattgagattctttaggatgattttctaaactttctacattaggctttcttattgaatttttacctgaaatatgtatcataaaaaaccaatgccattcttcaactggaatttagaaatttagagagaatttagaatttttagaattttaaatttcagttcagttcagttcagttcagttcagtcgctcagtcgtgtccgactctttgcgaccccatgaatcgcagtatgccaggcctccctgtcaatcaccaactcccggagttttaaatttagaatttcagaatttagagaaaaactgaaattaagaaatttgtatattctgaagctatctatctaagagtctcaatttccttctctcatttatgactcaccttcatgaaaataaactcacaaacatatctgtcactgaaaaattcctaatctaactatcagagaatcatgtttctaactaatttatttggagtcggtaaaatactttaattttatgttgcttgactttcttttttttaaattaatttatttttattgaaggataattgctttatagaattttgctgttttctgtcaaacctcaacatgaatcagccataggtatacatatatccccgcccttttgaaactccctcctggtcccacccctctaggttgatatggagcccctgtttgagtttcctgagccatacagcaaattcctgttggctatctattttacatatggtaatgtaagttcccatgttactctttccatacatctcaccccctcctcccctctccccaagtccataagtctgttctctctgtttctccactgttgcactgtaaataaattcttcagtaccatttttctagatttcatatatatttgttagaatacagtatttatctttctctttcagacctcatttcactctgtataataggttctaggttcatccacctcattagaactgactcaagtgtgttccttttatggctgagtaatattccattgtgtgtatatatcacaacttctttatccattcatccgtcaatggacatctaggttgcttccgtgttctagttattgtaaatagtgctgcagtgaacaatgggatacgtgtgtctctttcaattttggttttatgccacttgactttcttaataggcaaaagatttctggtatgtccttggcacttgagtccttaaatgctaagcacactttggtaattatcttgcagacaagtctctctctaaaaccaactactatacacgataaaggagaaggcaattgttgggggccagcgtgaggaactccacccatggcaaaggtcatgaggaaagaggcttggcatacgcaaaggcatgatcaagtctcaggaaaccccctgttcccgagcatctaaccccaaaaccagagtctgttttatgctctcacctacgcctctgactttacggggggctctcccccataaccatttccctcggagaaggagttaacttgcagctccaaggcaataaaaattcctgggcgtgacaagagtgtttcagcttacggactcctctgaaggttatctagcccgcctgtataggttcgtctggccacaggtgattgtttacagcctcccaatctgagaggcacgagatgttttagacttactaaaggcaaattcttttggagagttagaaattattagtatagtgagttggttaggaattatattggtgaagggtttttcatttgttgggctgatgtttgctgctaaatctccatattccctgcccttataatgaatataactaacatataggagaaataagtattaacctttaagcatataggagagataggaattaacctttaagattaatcctgttaaccttgggttaaataaattcctttcttgattgtaactcactacaccctcaccctataggaatgcaactttatctggagggtcgtgcctggtttaagaaaaaacacccttggaagaaataaggtttttggttatcagaaagaaaggaccatagaatgtcagcaggtctcactcatggccagaagatgatgtaatatccctaagacccccgcatgactctgtattcatccctatgtgtaacaaaaggtatataagcaaaccccaaaataaagaaatcggatcagtttccggaaagactgattccaccatgtcgcttctttcttgctcccgtttctctggctgaaattcagcctcttttctccactaattctcctactacactatccgtttctaatctctatatctgtaattaaatatgtatttttccaaagacgccgacgccgtccccccaccttcgaattaccctggatccactggggctggaccccggcaggcaatggcaccctactccagtactcttgcctggaaaatcccatggatggaggagcctggtaggctgcactccatggggtcgctgagagtcagatacgactgagcaacttcactttcacttttcactttcatgcattagagaaggaaatggcaacccactccagtgttcttccctggagaatcccagggatgggggagcctggtaggctgccgtctatgggatcgcacagagtgggacacgactgaagtgacttagcagcagcagcatgcatgataaacatgcaacacgataatgatactgtccaataatacgtatgcccaattaactagctctaagtctcacagcaagttcaagagaacactgcttctgtaagtatctgaaaagtttgaaaattactgagctctcctaatgtgaactgtgtatttgaaacctgggctaggggtggtgtagaagagagaataagctgtttcttcccaacttacttgacttacttgatccccctcacttgatccctctttcactgtaatactatattgaaaggttttcagtaatattttgaggaacgctgatctacatagttcattaccccatagggtatttattaaataaagtaatgaccaagaagactaaaagagagcaattaacttttccagaaacattcacactgttttcttacactcaacatttttcatttctcaataaactcacactttctcaaagatttctgaacatttgataccctcatagagttttccctaaaacaaaaatgagacttagctgttttttacctaataagaactcagaaatgatgcttgaatgcaaaatactcatgtcactatcggttaaaaaacattaatttcttggactccaaaatcactgcagatggtgactgcagccatgaaattaaaagatgcttactccttagaaggaaagttatgaccaacctagacagcatattaaaaagcagagacattactgacaaagatccatctagtcaaatctatggtttttccagtagtcatgtgtggatgtgagagctggactataaagaaagctgagcatcaaagaactgatgcttttgaactgtggtgttggagaagactcttcagagtcccttggactgcaaggagagccaagcagtccatcctaaaggaaatcagtcctgaatattcattggaaggactgatgctgaagctgaaactccaatactttggccacctgatgcaaagcattgactcgttggaaaagaccttgatgctgggaaacactgaaggcaggaggagaaggggatgacagaggatgagatggttggatggtaccaccgactcaatggacatgagtttgagtaaactccaagagttggtgatggacagggaggcctggcatgctgcagtccatggggtcgcaaagagtcagatacgactgagtgactgaactgaactaaagtgtactgcactaaatacagattactaatcaaggactttgtattaacctctcagtttgattataatgtggttgaggacagcctaatcattgctcaagcagatgtactttcaatatgagactttaaaaagataaactatttaaaaacatgcttatagtatctgcaacccattaacatgacaactaaaaagaatacaagttattctcccatccaagaactaactgggcccaatcctgcttagcttctgagatcagatgagatctgggtgcgttcagagtgctatggccatccaaattattctctatattcacatatagatgaatgcaaagacttacgtataagaatatttactgtactatctttttctgctgttgtcttcctggtagctcaaacagtaaagaggctgcctgcaacacaggagacctggattcaatccctgggtcaggaagatcctctggagaagggaatggcaatccactccagtattcctgcctggagaattccatggacagaggaggctggtgagctacagtccatgggatcgcaaagagtgggacagaactgagcaactaacactaaactatctttttttgcagtgacctcaaattggggtaagtcccaaacagcttatccatagagagtggtataagaaaatttatagtattttctctaagtgaagtagtattcaactgttagaaagaatgagacaaacacatatgggctgacaatagaacaatctctgatttttttaaataaaaataggtacagaaaaaatatatgtatataaaatctcatggctgtgttatttttttcttttttacaggtggaaagtgctacagagattgacaaataacagacatgaaaaatagtaaactaaaactatagacagtgattaccttgataaaaaatgaaaggatcactattgttattacataacctttaaaactactttcactttttacaatgtcattattttaaaataacagaatatattaataacgaatctaaagttcacaatcccttatactctaatttgaccctttaactagtatttgtgtgcagggtaccagcagcaacatgtagcttccaggaaaagcaagagggcttactgaaaaacttttgacagtgtaacaatgatactgaaatatttcaataatctgcaactaaacatggccttctgtcctactaaacaatccctattattgtagattaaaaagtccaatgacagagcaaagaaaatacacattatcttagactttaggataggaagctgcaatggaggtggggacttcctaatgaccactgagaagatgacatttgagtcacaatcagagggaagggactgagcttgccatgcaaagtgaggaaaagataatccagtcagtaccttggaactccccaaaggctcaggaattggaggacttcagtactatgaaagtgtggatgaaggtgaagttaaaataagaatgttgagggatttccctggtggtccagtggttaagaatccatcttgcaatgcagggacacaggttcaatccctggtagaggatctgagatcccacatgtcgcggggcagctaaacccatgtgccacaactagagaaaaagcctgtgtgccacaatggagactccgagcagccaaaaaaatttaaaaaataagagggctggtactgtattgacctgttttataggctttttattaaaaagagaaaactaaaaaaaaaaaaaaagaggttggtggaatgtttaggtaaagtttaaaccctacctctcactcccttcacccactcttacttagcaagttggccatctctccatcttgcgcatagaggaattgcccttcttagcaaagagcaaaacagagatgtcagctgggattctacacttgaagacagggtatcatcctgaagacagggagcttaagtgaaaaagtatatgctaaatattaaaaaaaaaaaaaacaaaaacaaaaaaaacagttatcttctgcctctatatcccctgaatgttagtagccaagcctaaaccttctcatttgggctactgaagcacccctctcaggagattctgactagttcccagctaaagagctgacattgatggttcagatgactacacactaaagaccacagtcaaaaaggcccctccatgaaggtggggcttccaatcagctgttcaatgcctcaatcataataaataatatataccatgtaacaataaacatgtgaggagaagggggaaaactaagaaaacgcgagaccagaaactcacgcgagaccagaaactctttaaaatacaaagatatttaacaccatcaaaaaacagtggatagtgcacagttgtaaaaatgctggtcctaaactaaacacatacagtctatattagcaggtgattggttaaagcccttttccccatcttctttataggtcactggcaatctaataacagtgacaaataagcacaaatgtgcttggatcaactatccaggattgatctacctccttttaggaataaagaaacctaaggtattggattacatagcttacaagctgaaattttaatcaatggttgcccttcctttttgaatcttccaagatataaatgaaatcatggctgaagtcaagctcagctaagctttgaatctttcagcttccttaatttccttttattatgagttctaatataagaatgaaaaggccagttctctcattttagtggttgattaaattcttttaacagaattctttcacgtgggtgcttctaactttccatgtaacctactgtccatctgaccatgagacacgttaggctccttgtatgtaacaatttgttgatactattttctttgaaacagaatgagagtttcattcgggattttctttgaaacagaatgagagtttcattccggaacttgagagagtcatcttgaacggcagtttattactggaaaggatacaaaatacatttcaaaacaaatgagatcataataaacacatctgagactataataaaaacattgtgacaattttagattaaatgtattttcatttatctaattgtgatgctgggtagatgatacaccatctacttagacttggacataaatgaaacagagctggcagacatctgatttagacaggaagaaattatgctggtacataggatgtggtgctacaaatggtaaagaactggcctgccagtgcaggagatagaagagatgcaggttcagtccctgggttgggaagattccctggaggaggaaatggcaacccactccagtattcttgcctagagaattccatgtacagaggagcctggcgggctacagtccatggggtcacacagagtcggacataactgaagcaacttagcatgcacacataggagtgttggtggtaaaatctataaaatatgatgcggattttctcagccagtgtttgtcctgagcagtcagagtctacaacatttgtgtattttcctggggtgtcataaggagaaggaaggaatgtctcttctctcttaagtgtgatgatggggtagaaacacctattttttaatggaatcctgagcactactcactataactcaataatctcactttaaattacatagtgggtgtttctgaaatgaactgttaaatgaatgaataaaatatagtcagcatcagtctattctgaaagaaatattagaagctctgtctaacacaatggtactatgctttgtgagaaggaaaataagggtgcaggccacagcagtgttctcaagaataagttcaatttatatgacaaacttttactaagagcctaccaccaaggacagtgttgcaggtacaagaggagagagagacctggtatcaagtagcttatatcagtaaagataaatacgtaaacaataaaccataatatgacaatgtcagaatctaggagtgtgaacaaaattactatggtaaaacacagattcatttaacttaaggaaggatcactatgttagaaggaacatgtgggaagcagcaaggatgagtagaggtttaaaaacagaggagttaaaagcattttagatcaagagaaaaataaaaacaaacacatcagaacaacagaatatacagaggatacttttaagccaatacttttgtcacagcatacatcaggataggagaatcaagaaacattatacaaactataacaaagctctgaagaggctgaaatgactcccccaagaacttgaatttaatacataggaaggaaaaggaagcaagaattctaaagcaagaaggtgataatactgctatttgggtcgtagatgagggacagtttggtgagaacaaggaaaatggaaaggtgatggactactgcttgattggttagaaggctaatgcaatggtctaacatgacagaatctgaccctaagttaggtcagtaatactagcattggtagaaaaaggaaagagcaagatataaaattgccatattatagactcgttcaaagtaggtaatttcactcacattcttttaattatgttattctcaagagttttatatttcaaaactgaaattcctttaagaatataagacattttagagctgtcaggaccatactacatcatgctttttacaaaacattttataaaataggaaaagagcttttaaaatgtgctgtgtatgctgcaaactgttgaagccaagtgatgggtctagaggggtcactatactataatctctacttttctataagtttgtattgagatatatgagtaaataaaggtataatatatttcaagtatacaaagtgataaatacatatatactctgaaaggattcccacgatcaagttaattaaaacatccatcacctcacatattcactttttatttcttttttgtttttagtgagaacacaaattcaactttttttttttgctctttattatttatttatttattttttactttacaatactgtattggttttgccatacattggcatgagtctgccatgggtgtacatagcaactttcagttaaacaatatagtattatcaactataatcatcatgcgccataagcctttttttaatgtatcttttaaaagtggtttcctttctgactgtatgctatttaagtaggccagtaaagcaatctaacatgtaattcacagaccatggatgaagaaaataacattttatagagcaagtacctttctaattaaaccttataagcactatttcatatctataaataatcctaatttttaaaacagaattttatattatatacatgtatatatatatatatacattggcataaatattgatggacagggaggccaggcgtgctgtgattaatgaggtcgcaaagagtcggatgcgactgagtgactgaactgaactgaatgcagaaagcaatcatggaatgactaaactgaatatcttaatgatgagatgtacagttctgaaatacacattttagttagtttatttcttaaacctcaaatacatgatttcacgatttcacagacgctttcctcagagaggtgtcctctatttaaagatcagaaagaaactcgatgcttccaggcaccccacccacagaccatcacagtatgagcagtaagtcctacttaactaagaaaattaagaacatgtatttctttcttcttccctcctttcttaagtcatctttattctcttcccttcctttcttccttccttctgagaaaggacagcaggttgagttaagcctaactctttgctctgctgcttattggctttgggcctcagacaagtaacagaccctctggtctcaaaacagtggtgaacatctatctctaattcagttacgtaaggaataaatacatttcagctgttatatcctctacatccatcttcattatcaccacccaacttgtaatctaccaatatgctcttgattcgtcacatatccgttcccttcaaatcccaagagttactttctaaagttacttcaccctgcagaaacggttcacaggctattcaatttccaagtccaataacctgttccccagtgttcactgtactctgcgtctactatctgacaataatactgccattctatagtttctttcccgtgatgatatcatgtgctgtttgggcttcaatcatcaccctcatgtggatgatgccaaaatctatgtttcctgcaaattccccaaaagaatttccagctgccaaataattccacatggtctagattgctagtagttcaagcttaacatacacaaacatcttaatcatccttactatcccaataaaactcttgttttctttactgaagtaaacacactatcatcttttcgaacacttcaaaaatctttaacccttcatgttcactcaaaatacctattccattttaattgtgcatcgagttctactgattctgcctttggtatttatctcacttttttccactgctaatgccctaattcaagactcttcatttcagcctggatttatacaacagctaaatagtctctgcctttcatctattctcgttgtcccatcactgtatatctatcataaaacagtcacctttgttcttgttttttttccttccttcttcctcaccataagtagagctcctcatgcttttaagtatcctcatgtactgtaaattcaaagctgtttacttgttctaagtttggctattgtcgtatcaccaactcacagaatattttagattttctttcattttctcttatgttttatctgtctcaataattccccttggtgaaatcatttttgttcttttgttacctgcagtaactcatctaagtgtattctagagtcagtacagctttttagatgaccacttatcacctagccctttattttttttaaagacgttattttttagagtagttttaggttcacagtgaaacagagcagaagaacagatttactgtattcccctgtgcccacacatgcataggccctaccattatcaacatgtgcactagaggggcgtattcataactgacacatcctaacgacgcaaactctatagactgcactgtggttcacaacggtgggtctggataaccctatgatgacgtgtatcaccattacagtatcatacaggacatattcaccaccccaaaaatcctgtgtctgcctattcatcccacctctacccctgcccaacctctggcaaccactgatcttttactgtctccatagctttgtctttcccagaatgtcatatagctggaattatacagtatacaccctttcagattggcttcctttaatttttttcaactatgttattttctttggaaaatctataatatattggttaaggcaagaaaatatttcaggtttataggtcagggctactcaccaagggttcagccattacaacttcaattttcttttcagcttgaacagcaaattctgcaaagaggctcttgatgacatattcaccaggcttgacatctgggtcaattgtaatgcttgacatgatgatattctttttccccaaagtggaatgagagttggaagaagtgcagtacttattcactttgctgactggtgctgaagctaaaagaaaagaaacaaaagaactctactttaataatcaactcaattaggccaaccataaccacttggtttaacatgcaccctgcccctaaacccgaaccagatctcccaatctgtattaccagactctattttttctattacacttgttgctgtttaacatactgcccaatataactataacttcattatatatcatgtttattatgtactatttatttattatgtgctatttttctcctcaccctgctgttgtgaattctatatgctcggagactctcttttgtcttttttgttcactgatgaatcccaagtgcttagaacaatgcctggtatatactggggatacaatacatatgtagtggatgaatgaatgaattctaaacaaagttgtatgcagcaaaggaaatatgtgtgaataaataaaatgcaaattgtgttaagttaaaatacactattttggagagaatgctctggaaacacatttgaaaaagcgaactacatttgaactcacatctaaattttgaaaaagaagaagcaaggcaaagcaccaggaacagaaagtacaaagttgagttgaatgtttgaaaaacaaaaaaggaccagtgtggctgaagctcaagggatggagcaggggtggaaggcaatgtgagatgaagttagaagcattagtcagagaccaaagttttagagctctataaggaaaatggatattactctcaacgcaattaaaattcagtgcaaagtgatgacttggagaggaagaggatctggcttctctttaaaagattcctggctcctctggagaatgcattagatgaaggcaaatgtagaatccggggagccactacaaaaaatccaggtgagatgatcacagcttgggctaagaggatgatgatggcacagaagagaagggtctgtcagatgttagtggacttgctactgacagcaggcaagcaactcatgatgaatcataggacttttctttggatcattcaaaagagagatcaagatgacattgtgcctggcaaacagtacctcgaaccaagtgtgacattaagaagagcagctgttctgttttcttgatgcctgggcagcctacctggcttttatctagtttctccatttgccttgatcttcctacctgctgcatcaaacagaccttcccattctctaacttcagcttgtgacaacccctttggcctagaatatccatggagaaacctgtaagaaatgtacttctctaccttgacctgatctccagagactgcgctttcaacatgctgtcctagaaattactccctccttgaaataggaagcagaacacaattttttcaaacactttctgttcatgtgtgtgttacataaccataggacaataaatttaatctaaagaaatacattcccaactcataaggaattgttctgtcaactaaaaaaacaaaaaaaccctactctaccaaacataacatatgtcaagacatctgaagtgaccgtggtaactccaaaagaaaattctagaaagtaatgtaaaatcaggtgagggcagtcacttcagaaaaaaatcatttgcaaatttaaaaaataaatatttttgaaagacagaacttataaatgccaaagaatggcttactttcatgtcctatccattatctatgtttacttatttttgcatagtacagaatattttcctccaatggtaagattacaaattagtcatgcatgatgcttatattttcaaaataataataatctaaagaccattataaacagttaatattgcatataaaataaatatctttgtatcacataaaattaaaatatatattgtattctagaactaaaatcatataaaagagttcaaaataaaattcacagtcctttgaacacagtgtatgctatttattttaaacaatgacgtgtttactctgtttcatgatccaacattgtatattataaaggagagaatgtgttaacaaatgtcactatggggaaagaagatcttaaatttaaaaattttattttggatcattaagaatattttatattttatatccacattatgttagatagctgtagagaatcataaaatagtcaaaaaggctactcagtttctagaatttacattttaggaataaaaatgaggataaaacattttaaaaattttgacttatggtagtagatgcaaaatatatcttttcctgtaattaagattcataaggtcatatgagggttacaaagtttctttggctttaactttataataaatgttttaaataagaagtctataatagatcttggcacttgaactgtagactttgatgaggtataactttaatgcattttaacttttaaagtcttctcaaaaagaaaaactttaattaaaatgatcactcaaataactcgttactgtcttctacttcctaaaaagcataaacataagttaagcataaataaatatgcctaggtatcataactacgttttcaagacatttgccaatacaaccagaagttttagggaaacttatatttatcttccaaataaaggtctatcttccaaatatctgcattacattctaacatcaaaatacttcaacttgaaagaaaaatcaaatttttagtgtttaagagttagtcagttttacctcaaaatgaaatcagttagaaaaagacccataccagaactgaaacctggacaaaaaagatgaagaaacaagctacaaaagataaaacaagccaataaccatgaaaacaatatttaacttcactgatatttttaaaataaataaaaattagataactttttttatgtaccaaaatggtttcccccaattgtgtatttcactataatgttcagcttggctaagatatgtgaatttttctcatattctgctaatagttaagaaaaagggatagtcactctaagcagggttaagaaggttagttactacataactagattaacctgatgtcaccagactgcttgagtcaaatattttatgaagctaaatagtactatttctctacatgctattaaagttatttgaaaattttacatatgtctactagagaaggaatgatgctgaagctgaaactccagtactttggccacctcatgcaaagagttgactcattggagaagactctgatgctgggagggattgggggcaggaggagaaggggacgacagaggatgagatggctggatggcatcaccgactccatggacgtgagtttgagtgaactccaggagttggtgatggacagggaggcctggcgtgctgcgattcatggggtcacaaagagtcggacacgactgagcgactgaactgaactgaactgaactagagaataatgacctaactgttaagagtgtaattcttaacacaattcaggcattgaattataagttgtaaaaacccaatgtcatattaaacatccttggaatataaatctattaaactctgataataaaaagaataaagccagacctgagtgattaacatataaaataagatagaaaaattaaaagctagcctgtgtactctttctcatagatatgtgtgaaagtcgttcagttgtgtccgactctgcgactccatggatatacagtccatggaattctccaggccagaatactggagagggtagcctcttccttctccattctcatagataaagtgcaaataaaatgtaaataaggcacttcgaaaattatttatttatttgtatgaatgtactgggtctttgttgctgtgtgcaggctttctctagttgcaatgcaagggcttctcattgcagtggcttttcgttgcagagcaggggctctaggagctcaggcttcagtagctgtggtatatgggcttagctgctccaaggaatgtggaatcctccatgggacaaggatcatcgagcccatgtcccctgaattggcaggaagattgtcaacctactggaccaccagggaagtttggtatttttagacagtgagctctgtataacattgtacttagcatgtttcattaaaaaaaaaaaaaaaattaccttcttcgtgctcatgagtctcctattcccttacaggataaatttaaattcagtgaaggagaacagacatgtaagaagagacacaaaaaccctaagttgaatcatgtttgatttcattactttatagcagtggttcttgttgttttctgcctctgttatatttttacgtgcaacactctatacaatgctgctgctgctgctgctaagtcacctcagttgtgtcagactctgtgcgaccccacagacggcagcccaccaggggtcccctgtccctgggattctccaggcaagaacactggagtgggttgccatttccttctccaatgcatgaaagtgaacagtgaaagtgaagttgctcaggcatgtctgactctttgagaccccatggactgcagcctaccaggctcctccatccctgggattctccacgcaagagtactggagtgggatgccatcgccttccccgaccttatacaataactccgtctaaattcagtgactcttagtgattgagctgacctaaaaaagatgagtaggggtgagtagatgtagttttaaaagaccccagtggagtccatgaaaactgcatgcagcaccctcacgcccaaggccaggtctttaaacataaaaattactactctttggtcataatcttatacatacatatttatgtagagatttatataatacagaaaagtaacaaaatactacacaatttcttattataataattatttacttatattgttaataataaaacatgttgatgatgacctaagaaggaaaaggtataaggtaaatggcctttgaacaagaccaaaagtcaaaaatatctattttaaaagacataagcaaaactcttagtttaaaaagcaagcctctcccagcaagatattttgtggctatcaacaaactgactgaaatttacatgaagaggcaaataactcagaatagccaacacaatactgaagaagaacaaagttggaggactgacactactcaactttaagacttattttaatgctacagtgaacaagacagtgtgctactgatgacgaatacatgacgacatcagtgggacagaaagagagcccagaatagactcacacagagtcaactgaaactaatctctgacaaaggagcaaacgcaatcagtggaaaacggagaattttcaacaaatggtattggaataactagacatttgcatcctataaaaataaatagatctagacacagaacctacatcttttacaaaaactaactcaaaatggatcacagatctaaacatgaaatgcaaaacaataaaattcccagattataaggagaaaatctaacggttcttgggtttggtgatgactatacagatccaacactaaaagcaagacccatgaaagaaaaactgataaactgaagcctttattaaaataacttcagctctgcaaaagatatcgttaacagaacgaaaatacacagactaggagaaaacctttgcaaaacacgtatctggcatccaaaatatataacaattcttaaagtgcaagaagataaactatccagttttaaaacagacaaaacatctgaacagactgcacaccaaagaagacatacagatgacaagtaagcatatgaaaagatgctccacatcatacatcttcagagtaatgcaaattaagacaacgacgaggtaccactctggatgaaaaatgtcacctgcttatcagtaaacaaaggaacttgtagttatgaagccatcagccactgcagaccccctcacgtgtgcactctgaggagagtcaggatggagaaaaacagcatactggccctagataattaaggtacatatcaaaggaatgatttcaataagcccagatgcttccatcttcccatacatagaaaactgctaagttcattaacttcagatgtctgcttttctttaattaacagtaaacttttgatgttctgattacctggctttttgttgtaaaaactctaatatatatcctgactcctcctttacctcttagaagcagtccttcaaagctatctgagaatctgcctcccaggcctacatcctcagcaagtctgccaaataaaacactatcctcagtttttaggctgcactttttttcttttttcagccaacagcactacacacctatcctagtgatcaaaatccacaacagtgacaacaaatggtggtgagcctgtgggacaacaggaactctttgtcatcactggtgagaatgtaaaagggaagacagtttgaaggattctcacaaaattatattcttatcagagaacacagcaactgtgctcttttgtatttacccaaaggagttgaaaacatacatacacaaaaacctgcatgcagatggttgtagttgctttattcgttaactgtcaaaacttggaagcgaccaagatgtccttcagtagctgaatgaataagcaaactgtggtacatctagacaatggaatattgtttagtgctaaaatgaaatgaattacatagccatgaaaagatgtggaggaaacttaaatacatgttactaagtgaaagaggccaatctgaaaaggctatattccaattgtatgatttcaactatttgacattctagaaaaggcaagactatggagacaacttagatgagtgactgccaagggccggagggagggcaggataaataggtggaacacagaggatttttaggggcatggtactattctatatgatactgcaacgctggatacatgtcattatacattgtcaaagcccatataaagcacaacaccaagactgaagctgtaaactatgggctttgggtgattatgatgtgtccctgtaggtccatcaattttaacaaatgtatcacattaatgtaaagtgtcaacaggagggaaaatgggcagagcagggagggcaggagaaagaggtacatgggaactctctgtactttctgctcaaatttctataaacttgaaactgctctttataaaaaaagtctattaatttttcagaaaagaaagaaaggcctattctattcctgtcagctagaaccaaaggtgcctgggaagagccacaataaacaacagcccaagccaaagcttaaaacaaaaatgtatttggattaagctaagaggaaaaaaggaacaaaacaatttttaagtcaattaaactaaaacatcaaaacacaaatcaggttacatggtagacaaattgaacacagagacaaaggtagcagaatcagtattagggaataaatgaaaatttcaacttttggggagaccagttggattcgtgtatctttctaccaattatccaaagcaaaactgtacatttgaaagcaattatttctgaagaggaaaaaagaaaatataaataatgtgcatgttgaacatgttaagagataaattatgaaaatatcatgtgatggcttccgtgcacaaacacaatttgctacatgaggcaaggaaagtgaaagtgttagtcactcagtcatgtccaactctttgtgaccccatgaactgtaagccgtcaggctcctctgcccatggagttctcccggcaagaatactggagtgggttgccatttacttctccaggggatcttcccaacccagggatcaaacctcagtctcctacattgcagattctttaccatctgagccacaagggaaatcaacttagccaaaggtaaggaacgtatacctcaaaattccttcataaatgaaagaacctcacaccagacaccattcgctgatgattttggagacattatttaatatttattaagacattttgcatagtatcttattttatgctaacaaaccaaatcttatttcaagtgataagctggtaaatggccctctttaaaaaaaaaaagtcctgatttgtagcatttgataatttccattgttcaatcactcccatttatggatgatttcaagccatcaataatttatcaaccagctggtaaaattcctggaaggaactagatccaaaacatcacatcaagttattgtccacatacaacaaggaaactgccttctaattaaagtcgattgtttcatttggatggaatgtgaacttcagtcctcagtttaagaactttcagatcagtggctttatatcctctaaaactgccagattttgatatatccatttttcctccttaaaagtctgtattattaatgtactatttgcttagaataactatcccaagtcaaatatggttgcatcttcaaattcatttacataaaataggctaaaaaagaaaaagtattcccattttgatcagacatatatttaacactatttacttttaactctcttttagtctcatttactccatttaaatctgtccaactggaatttatttgaggtgttacacaataaagatagtttttccttaacatttaattggttcttctcagtatctttactaaaaatttgtccctaattttcactatcataaactaaattcatactcaaatatgctttccattttgctcatcaacaatcagttttgtatcagcaccattcttttcattattgtagctttataataggttttattatctgttggaaacaaatactcctggtttactcgttatcttcaggaatttctcatttattgtcatttacttatacttccaagtttatacaaaccttcacaaagtaattagaagacatctgacaccttaattaacttcttatctagaacctggcatacccttactaatttgtcttctttcatgaacccaaagaaaaatgtctattttgcttcataggagaaactctccaattcttctgtttctaaatactttgtctattctgtgtaaatgaaattattttcctcaccactcaatccaaagattttgcttctggatgaatttcaatgaagagaaaaaataagacttttgcttgttctttggacagctgttcataaaatgtttatttatcctaggctaaactattcccattgaaaacaatttctaaacatagaagttcctatgacatctttggcacatttccaacttttttttttttactttaaatctaccacagaaatattgtttactataaagatgaagaaaaatgaccgatcatctaaataatccattactcggccagaatctccctgtggttattatttttgaacaatcagaatcttggctaggaaactattctataaatttagtaataatgtagtattttaaaaatatgtatagatctaagagtcagaagatgagagccctagatttgacttggctactgagtgtcattataaccttggtcaaaatactgaagctctctaagctttgctccccctccaaaaatgaatgagttttagctcaactgtgggtatggtatcagaagcaacaaaaaaagttgttttcatttttgttctccattcttctgcccataaaaattttcactgccaatgaaaaacccacagtggcaaactctcctctggccagacgtaagcttgggcactaccacagcacagccgtaaagtaaaaatattgggttggccaaaaagttcgttcagctcatggaaaaaaccaagcaaactttctgctaacctaatgtatatgaataccagaatcctacagtaaacataccgagttgtttcatccagtaaacgtacctagacccagggcctgggagaggtaaataactacatatggttttgtacccgtttttcttcgacttacaagaaagcgagcagaatctaaacagttgggctgagttctttatacccttgaggctgataagatgtaaagagaccaagaaaaaacagactttctcttaatattttaattggttgctaactaagaaaggcttatggagcctgcatttccttccatcactcttgggattacactttaaaacagtcatatagctgtacggcccatacactttattagctgacaaatttactggtatccagcagagacaaaaggaacgaaaaatttaccatacaccagcagcaaatatcattgtagatttcaaaacatcaaatctatttcaattaaaacagaaactaaacaaagatgctgattcttgccttaccattcacttctgttctaaagtttacaggataataagtaaatgcaataagataataaaatgaaatcattattataaatattgagaaagaagatatgaaatttattaactagcaattaccatgtagaaatgaaaatggataaaaacttactcacaaatataaaatacataggtataaatttaataaagaagcataggacttacatagaggaaacgataagaacttcttaaagaacataaaaagaagacctgaacaaaggtacggacaaacttacagataaaagcatttattcgtttaagtgtcaattcccagaaaatatattagtacaattcgaattaagatttcagtacaattttatttaggttgtattagataaaaattatcttagagtatactagatggtgaaggacagggaagcctggtgtgctgcattccatggggtcacaaagagtcggacacagctgagcaactgaacaatactaggaggagggcttcctcggtggcgctagcagtaaagaacctgactgctaatgcaggagacatgctgctgctgctgctgctaagtcgcttcagtcatgtctgactctctgcgaccccacagacggcagcccaccaggctcctctgtccctgggattctccaggcaagaatactggagtgggctgccatttccttctccaatgcatgcatgcatgctaagtcacttcaatcgtgtccaactctgtgcaactcctccgtccacaggattctccaggcaatactggagtgggctgccatttccttctccataatgagatgcaatgcagtttcaatccctgggttgggaagatggccaggaagagggcatggcaggtgccctctaagtgtccatcaacagatgcagggataaagaagctgtggcatatatgtatgtacgtgtatgtggaatactatttaatctttaaaaagaatgaaattttgcatttgtaacaacatggatggacctggaggacataatgctaagtgaagcaagccagacagaggaagacaaatactgaataatataacttatatgtggtatctaaaatacaactaactaacgagaaagaagcagattcatagatatagagaactagtgattttcaacagggcagggaagaggagaggagtaatacagtggcaggggattaagaaggaaaaactgttatgcataaataaattacaaggatacactgtacaacacagggaatatacccaacatgctgctaagtcactgcagtcgtgtctgactctgtgcgaccccatagacggcagcccaccaggctccccatccctgggattctccaggcaagagtactgcagtggggtgccatttccttcttcaatgcatgaaagtgaaaagtgaaagtgaagtcgctcagtcatatccaactcttagcaaccccatggactgcagccaatcaggctcctccatccataggattttccaggcaagagtactggagtgaggtgccattgccttctccgatacccaatatagtataactataaatagagtcaacctttaaaaattgtgaatcactatattgtacacctgtaacttgtgtaatattgtacatcaaatataactaaatttaaaaaaacgtagtaaaataggtaaaatatatctatcagtctacatataaataattatatcagaatgttatgtaaaagtaattaactcagtgaatattaaatgtacataatccagatcaatataaaagattggagagcctcgccaaaatttcagaaaaagaattcaacatagtaaaagtagaagaaaagaggtgatttatttagtaataattttggaatatcttgctacttgtctgcagaaaaataaatataatatattcaaagaccaaatgtattaaaaagaatacatttgaatcagttctgatgagatggatgaaactggagccgattatacagtgaagtaagccagaaagaaaaacatcaatacagtatactaacacatatatatggaatttagaaagatggcaatgatgaccctgtatgcaggacagcaaaaaagacacagatgtgtatagcggacttttggactcagagggagagggagagggtgagatgatttgggagaatggcattgaaacatgtataatatcatgtaagaatcgaattgccagtctatgtccgatgcaggatacggcacgcttggggctggtacatggggatgacccagagagatattgtgtggagggagggtgggaggggggggttcatgtttgggaacgcatgtacacccatggtggattcatgtcaatgtatggcaaaaccaatacagaattgtaattttttatttttataaaaaaaaaaagaccaaattccagatggatatgaagtaaaaatgttttaaagtcttagaaaaaaattcaaagtcaacatgcataatccaggaaagaggagaatttagtgaagatagaaggcccaaaattatttaaaaagaatgccttcgaccaaagaaaattttaaaatatttataaggaaatttataaggaaatgataaatataaggcatcacggactcaatggacatgagtctgagtgaactccgggagatggtgatggacaggagggcctagcatgctgcaattcatggggttgcacgactgagcgactgaactgaactgaactgaactgataaggaaatgatatcataaacaagaaaggacaaaagttggggggaaagtcgaatgtagatgacagaaagtataaaatattcaaagacttcttacaaatttacaatagaaagacaaggcaacggagaaaaaaaaggcaaaagatgtaattagacaattctcataagaaccagtctaaaaagacaacaaacatatgaaaaaaatattcagactttgtactggccagaaaatgaaaattaaacttgcagtgagctttcactttatacacaaacattaaatttgtggcaaatattaaaaagaataattggatgtatagctgaaaaggtacaaggaaattaacacaacatattgctgatggaaaagtcctgttcaacagtcaagtagggtggacaaaggatgagtgttctggcccctatagcagagcctgggcagataataaatttctttgatctttaggctctccatgcaacttcctgattacagtgtaattttgtatgatctaccccacaagtagagcaaagaacggtcggtctgccagctccagcattaatgttctttcacttggcatatttctcattgtaaattagtaaattggcacatgtaaaagcttgtctctgtcagaagactgtttataacaattctgccccttgagaatgattttacatccactctcagcattctggcaaagtcaggatttcctgacctgatggcagtctttgctggccttctctggcaattccttaaatcagaatcaaactctctggagggagatccaggcatctgtatgtttctgaaaactccccaacgtgactcttttgctgcgcttagttgctcagtcatgtccagctctttgtgactccatggactgtaacccaccaagttcctttgtccacggggattctccaggcaagaatactggagtgggttgccatgcgctcctccagggaatcttcctgacccagggatcaaacctgcgtctcctacattgtaggcagattctttaccagctgaaccattgaggaagtagccagggtgaaaaccactgcctttcactactcttccaaagcaaaacattggttctacacaatgattttatttaaaactaattttgatgagaaaaagtttcaaaaacaccataaacaaggaaacatataatatcacaaacaacatccatcagagttagatgaatgcatgtcagggacagagctctagggagcagagaaaaggatcattcataggataaataaaaaatctaattttaaaaagttatctatagttctctcaattcatactagaaatcttaaactgatttttctttcaggctttcagtctcttcactttactcactgtccatgacctaaaccacatatctcggtggccaatcaatccttgcctttcattatctgtgatttcaaagaataaagtttcagtgatctaaacttaaagagttatcactgatttctccctgtgccctatatttcatatctagtctagccatcaaataccatgactactaaaagtaatccccacttcctttttctgcatagctgaactttctgcataactgaatttttaagttcaggtcccaataatagtctacgtaaactccttaaaagtcttccttcacagtcatccctgcctcttagctgatgaaatatcaacttcatatagcagccaaagggactactttatatttgaaccatgtgtgtgtgcctgccttctaagttgcttcagtcgtgtccgactcttagatcctatggactatagcccaccaggctcctctgtccatgggattctgcaggcaacaatactagagtggattgccatgccctcctccaggggaacctccccatccaggtattgaacccacatctgttatgtctcttgcactgggaggtaggttctttaactccagcacctcctaggaagcccatatttgaaccagactaggcctttatattagagaaggaaatggcaacccactccagtattctttcctggaaaataccatggatggaggagcctggcaggctgcagtccatgggataacagtcagacatgactgagtgactgagcagaggcctttatatacggagaccctggtagctcagacagtaaagaatctgcctgtaatgcaggagacctgagttcgatccctgggttggaaagatcccctggagaaaggaatggcaaccccactccagtactcttgcctggaaaatcccaggacagagggtctggtgggctacagtccatggggtggcaaagagtcggacacaactgagcaagtaacactttaaacaacacaagggcccttatatgagcttcgctggtaactcagaggtaaagaattcgcctacaatcaggagactgcaagagacatgggttcaatccctgggttgggattcagtattcctgctgggaaaatcccatggacataggagcatggcaggcttcagtccatggggtcacaaagaattggacacacgaggagatcagccctgggatttctctggaaggaatgatgctaaagctgaaactccagtactttggccacctcatgggaagagttgactcattggaaaagaccctgatgctgggagggattgggggcaggaggagaaggggacaacagagggtgagatggctggatggcatcacggactcaatggacgtgagtctgagtaaactctgggagttggtgatggacagggaggcctggcgtgctacaattcacagggccgcaaagagtcggacacgactgagtgactgagctgaactgaaagcaactgagaacacacgcacacaggtccttacatatcaaacatcgcaatgcctctgtactctgcaaaaaaatgcaccactaaccttactttcaagactattactaaagccattttactggaatcatcattttcttttcttccacagtctccctacaataagaatggttcaaaactttatgtgaattttcatctttttttttttagaacaattttttaaagagcagtttttaggctcacagctaaattgagaggaaggtacagagacaacccatatacttcctgctcccacacatgcatccttcccccataatctacatcctttagtacacttgctgcaattcatgagactacatcgttatcacccagagtctacattaggattcactctttgtgctgtacattccataggtttgaacaaacgtaccccgtatggaacaattgactggttcaagattgagaaaggagcacaacagggctgtctgctgtcaccctgttttgtaaatgctaagcacatcatgagaaatgctgggctggaggagttacaagttggaatcaaaataagcaggagaaacatcaacaacctcagatgtgcagatgataccactctaatggcagaaagcgaagagaaacttaagagcttctttaggaggagagtgaaagaggtggcttaaaactaaatattaaaaaaactaagatcatggcatctgaccccattgctgctgctgctcctaagtcgcttcagtagtgtccgactctgtgcgaccccatagatggcagcccaccaggctcctccgtcgtccctgggattctccaggcaagaacactggaggaggttgccgtttccctctccaatgctgaccccattacttcatggcaaatagaatgggaaacagtggaagtactaacagatttcctcttcttgggctctgaaatcactgcggatggtgactccagccatgaaatcagaagacgattgcttcttgacaggaaagtgatgacaaacctagtcagtgtgttgaaaagcagagacattactctgccaacaaagggctgtatagtcaaagctatggtcttcccagtggtcacatatggttgtgagagttggaccgtaaagaaagcagagtgccaaagaactgatgcctttgaactgtggtgctggagaagattccaaagagtcccttggacagcaaggagatcaaaacagtcaatcttaaggaagagcaaccctgaatactagctgaaaggactgatgctgaagctccagtattatggtcatataatgcgaacagccaacttactagaaatgtccctgatgctgggaaagattgagggtagaagagggtgtcagaggatgagatggttggatggcatcactgatgcaatggacatgaacttgggcaaacttcagaagatggtgaaggacagagaagcctggcaacctgtagtacatatggtcgtaaaaagtcggatatgactgggtgactgaataacaacaacatccatcattacagtatcatagagagtagtttattttccctaaaaatcctctgtgcaccacctacttatccctccctctccccaatccccaacaatcactcatctttttactgtccccataattttggcctcttctggaatgtcatacagtatgtagccttttcagactggcttctttcacttagtaatatgcaattatgtttcctccatgtcttttcatggtttaatagctcatttcattttagcactggataatgtttcatagtctggatgtaccacagtttgtttattcatttatctactcaaggacatcttggttgcttctaattttcagccattatgactaaagctgctataaacaccagtgaagcttattttaaacaacaaagatccactgaacgcatctaatgtaaatgtcttatttgttattatgttatactgttactatattgcatgttaatggatattaatagattcttcaatttttgaatgcctttgctaactaggtaacttatgttctctttgaccaatgaatatatctgtgaagcaatgagaacataaattatgctaccaaattcattttataaaaccctagttaaaaacttccttgacctttcatatttaacccaagacctattgttcttagtcttaaatagttcccatatccatgattaagaaagtgaagtcagtcagtcgtgcccgactctttgcgaccccatggatagtagctcctccgtgcatgggattttcaaaagcaagaggactggagtgggttgccacttccttctccagggaatcttcccaacccagggatcgaacccaggtctctcacattgtagacagacgctttaccgtctgagccaccagtgagctaatattttgtaaagcatttagaagaggacccacagacccacccacgtgggagggattacatacatgtctactaaggaaataacatttgtttattccaccttcctcttatgtctgatctactgcagtagtaaccgaaagcagcttcctacacacgctgcaaccctctctcagcccctttttggtccccaatccatgggaaatggaactgatgaaatcacctgaaccactgtcacaaagcccatcaatggctccccctttgtttcaggtttacgatcgaaatgtatgagaaagtctttaggatatgtggtctggcctctgacaacctttctagctcattctcatcactttcccccatccctcagctccagtcagactagtgtatttcctcctactcccagcacatcatattccttctacccagctactgccccccgaaactgtcaactatttcttccttcacatttcactcaagtctcactgtgtgtgtatgctgagttgctcagtcgtgtccaaatctttgcaacaccatggatggtagcccaccagactcctctgaccatgggattccccaggcaagaacactggagttggttgccatgtcctcctccagaagatctgtttgacccaggggttgagcctgcatctcttgcgtctcctgtactggcaagcagattctttaccactagtgccatttgggggaaaagtctcagggaaattttaaaattgcaatatgaaggattagaagaagttagttagattaaaacatctgggtgtgtgtgtatgtgtgtttgtttttttgtaggggaagtgttcttagtgcactttaacttgtctgtgcccctatctactcttttgtaaaagcatcagtttttaacagatgaatggacaaatgaaatacagtatattcatacaatggatattattcagccatgaaaataatcaagtaccaatacatcttacaaatggatgaaccttcagttcagttcagttcagtctcagtcgtgtccaactctttccgaccccatgaatcgcaacaggccaggcctctctatccatcaccaactcccagagttcacccaaactcatgtccatcaagtcggtgatgccatccagccatctcatcctctgttgtccccttttcctcctgccctcaatccctcccagcatcagggtcttttccaatgagtcaactctttgcatgaggttgccaaagtattggagtttcggcttcagcatcagtccttccgatgaacacccaggactgatctcctttaggatggactggttggatctccttgcagtccaagggactctcaagagtcttctccaacaccacagttcaaagacatcaattcttcggtgctcagctttcttcacagtcgaaccctcacatccatacgtgacccctggaaaaaccatagccttgactagacggacatttgttggcaaagtaatgtctctgcttttgaatatgctatctaggttggtcataactttccttggatggtcataatatttccaaggatgaaccctggaaatatggtaagtgaaagaagtcacaaaggaacatctatagttgattccatgtatgtgaaagttccagaagaggcaaatctatacaaacagaagtcagaagactttaccagaagttatgaatatgtggtttccttttgaggtgataaaaatgttcaacagttagaaagtagtgattgttataaatacaattctgtgaatacactaaatgctacggaattatatactttgaaaggatgaattttatggtatgtgaattatatcacaataaagctgctatttttttaaaaaaaggcaataataacagtttttctcagattttaaggattataagagatttaaaatatgtgtatgttgtatacacacacgcatttacacaattatactatgcacttaacacatatcagacccataagtacttcaataaatggtgcatactgttttgagaaaataacacgggttttaactgaaattagatgaacgcataattgtgcttttaggattgatttttactatttttgcaattcaagaaaaacatctggacattaaaaacactatttatgaatttttacattgggtaaaaatccaagtaaattatgcaaatctcattttttaacatattttatcttacgtacattttaatttataaaactgtggttaaataagtcaatttatttcttctatgtctgtgataaaaactgaattctttgaaacactgtcacaaaattattaatgtaaattctataaattaacatatttacaagaggtagtatattgataataactgtatctgttaccttacactgaagatatataactaaatagatcttagtactaattcttgccttgtcttatcaatttaagagagctaagctaatctttaaaatgataacatcctcactacactgttggtttaacagaatgttcctgattcagtttttaaaagaagtaatgcctaaaactgttggcacaaagacaaaatcctgaatttaggccatatgaatgtcacttcattgttgttactgaaagaaataagctcaactataatcaaacttcagcagcactgcatcaacattctgccagctaagcaggcctcaaaaccagagggcctctagcaaataacataaaatgtggcatcgatcattaatacaaatcatggcaaatgcacctacatgaaacattattatatttaatgataaagaattataatatatactgctattaagttattttcaataacaaaaatcagatctttctctttccttttttctttggaggataggggcaatatttgaaatatatataacttatttaatggaaaaattactttccatttctttcttctccctaaaagctattaataaagctagtttttctcagcttttcccaaggaatttaccgaacagaatttagtcaaacattattatcttttttaatcactgagggatccttctatgcattcctacttcagaaactgttcccctgagagacatcactagtataataataatcacataatctaagagggcgcgtatatttttcctactacctcttttcctattattaatccattccaataaaaatgtgtgcagctctaagctttatcttaattgcctacacatttatcacaagttaactaagcattaagtctacaaagaaaaacaaaaccacaaccaacctatgcccttcggcaacttatcctcaagtagcagaggaagacatgaacggtgtggttagtgtagtgataacagtgatattaaagtgaagaacaggacagacaaagcacttagtatctggctgactcaagaaaaggtaggtcttaaacaggagtaagaattcactgtgacacagacaaaggggtgagggggtaggaggtgcattcgaggcaaacgcagctgcaaacaggcacagcatgctccaggaaccaggtgagtatggcaagagaggagaccagcaagatgagcagggctagatgacgacaggctccaccacacaggggaccggaagactacgaggtaaggaggggagaggctcacaatgcagacatttagaaggggccccgggcagcagtggggaagatgcagaaaggatgaaaaagaagctatggccatactccaggtgataaggcagaggcctgaactaaggcacctctaagtggtggtggcaacagaggcaggagagactaaggacacttcagaaggtagaattcagaaggcaagtcttggtgagtgactcaaagggctgagtcagaaacctggcttctggtttggggagactgtgggtggctgtactgcctaccaccatggggagcatcttattattcaaaactgaattccagtaaatgcctttgctgctaagtcttctctgccctctgtggttcaatatgattccttccaccctagggttccctgtgtctatagtgtgtaccagatatttggttaagtcataatgtaatgtaatgcatatgtaacatttttcacttaacttccttatgtgaacttgtcatgtatattttctgtctctgagtaaactatcaatagaagttccttataatcaaatatcacaaggttacagagcagtatgtaatcaataaacgttggctgattcaagtgttgtgcttgtgtgtgcttgtgtttagttgctcagttgtgtctgactctgagacttcatggactgtagcctgccaggctcctctgtccatggggattctccaggcaagaatactggaatgggtagccccttctccaggagatcttcccaacccagggatcgaacctgggtctcccacattgcaggtcgattctttaccatctgagccacgagggaagtcatattatgaacagatactaggaagagatagataaccactgtccttttctagggtcttaagactatcttctctctctctctttaaacacagtagggctaaatgaagattaaaagcttttaaaaaaagatatccacagatgctggtgaaataaaaatattctcccactttccaggattagggcagacatggttagggccttactgaacagtgagagttgtcacttcttttcagtagttatctactgctttaaaactattaaaaaacatcttcaagaggtttgtaccatgaatgcccaagggcaatgggatgcccacaaacaaaatcattcttttactaacagaggacagcaaaggttttacaaacatctgttttggtttcactcttggattcaaggaatacgactgcatgagatttggctacggattgttatatggttcatgtaatgacatgtagaaatgtttaaatggtcacaaaacaaaataaccacatagttcacaagcatctaaacaaactaagtttttacaggacaagctgctgtgtataatctaatatacactgtttctctataagaacccatttatagcttcattctcactataaaactgtcttactatttttaaaaaagtacatggtaaggacgggggaagaagggagaaggagagggaaagaggaaaaaaaaattaacaaccagagtctagtttattttagtaaaaatgtattctatagtatctttttaagtagtaaattatttaatttaaattagtaattataattctccaatattttaactatgtatattcacatagaagctttcctcatgcaaagataattttctgccatctggcacaataatatctccatatggaagcattacttacatatcaaaaataaaagagaaataagagattgtaaatgtagtatatttggcataatacaaagctcaaattatagtctataaagttctattttaagaggtcccccatatcaacatttgctcttttatactatttgattacaaaataaaactatatcaaatattttggttagagagttagccagaaaaaattaaatttagtctctcatattttattcattagtttcctcagaaacggacagcacagttgggagtaagaacaactgggttctaattccagttctttgccaccatatgaccttggaaaagtcacagtttttctatccttcagttttctttgggcaaaacagatactacagcagaatttctgcttgtttattacttcattaatctggtatcattttattaagatacttttcacagaaaaaagaaagaaaagaaaaacagactatgataataaataattttcataagtgctttgagatcttcagagaaaagtgccactggaatttactggaaagaatgaacaaaatcagtatttgccaagtccatatattaggaaaggagtgaataaaataagagctcagtgatattggttttaatgacttatctaaactttgaaatacaaaagtatatcatcctgaatattctttatcctaaaattgactacacgtgaaaattactcaatgtaacttcagttataggactacaggaaagttgcagtcattacattgtctgatgctttgagatagctgatgctgtttctaaccaacattttgtgcaaacatagctgtggaatagtactggtatccgataaccctgcagacagagatcagagtctatttgtcatctttattctccatttttgaccaatagatagaaactttgccaggacacaaattaataagaaaagcccagactggtcagagaatatttactcattttatagctgccagcatgtgcgtacctaggttgctctagctgtcttactgattcttcatgttattttcaacagctttcattcaatttgcatggggctaaagaattagcatgcaagaaatggcaatgatcatacctcaagcatttctcctgtttaggcaaatatacttacagctgctgctccaggactttaacaaggactttatgctaatttcaaaaaacacagaatcctgtagactcaacattgtgtcccaactggctgcagcagcagcggtagcagcagcaatggatttgttgatctctctctgagccgctgtcccttctgctttcacaggcagcagagttttggcccacagagcctcagcttcattaccatgcagtcttgcagtgacgcacaactatagtggaaatgctgctgaatgcagatgaactgttcagctgaataaaggcttataagtttatcacaagtgccctgaaggacaccctcacctttcctgctggagatacacacgtggccgaaatcaccagctctgtttattgtccccgttatcagttttgatgagctgtgtctctggctgctttcagtgtagtcactactgctagtaaacagacaagggtagcgctctgcccttgggtgccaacttttctagctcagagcctcagaagtcagaaacgaatttggatccaacactaagatatttaagtctcttcctataacagctgaccctctctgctgccaaaaaagcatcggaggtgtttattccactcccatcagtttctctaggtgattttcatagtcagttctctccacccctctacacacccaggcagcaggcagtgactttctcagcgggcttatgatgatgcagagtccactgcctcacttaacccgccagagagaacgctggctaatggaatgaaaggatgatgtaatggacaccgtggctgagcttccatcagcctctaaaactgctcggctcaggacaaagtttcctctgctacaggcaacttattcaaaagaaagaaatctattagaataatgggattattttaaaacatagggtcttctgttctcaacacaggacataattcccctcaaactcttatagtccaaataccagtaaacagtgagaaatcctctggccaaataaaacacacgttttaaaaactttattctatagaagctagttttaaatggaaagctgacactatttaaagtctgactgttcttcaaaatagcagaaatattctaaaatcaaacctgatgaataatatttgatgttaatatcagaagaaaaatgtcttgacctcacaatttaccattactctgaagatcagtactgggaggaggaggggaaggtggtatttttccatctgtggcaatacatttgtactgatccatctatatacttctgtatcctttaaataccacaaggaataagtaaattccatgatcaaagtcataactgaatagattaattcatagccaaaaggctaggcactgtattaaaagctaaaagaatattcttctgtgcataatacattaaggagaaaagatagtcatactcattaagacacattcagtggtaatagtattactgagagcatcatttaaagcttatttcttcagagtagtccaggaactctggaataagtctgtagccattcctacccctgaacagatctaaaatcaaaattcaaaccaaggctacaaaggataaccacacagaactccaataccacaatactgttgtttcagcacatcttcttgatcaaacacatctcaggatcagggaagaacaaggtttctcctggcctaatggaacacaagtgcctcaaggagttgcatgaacaaagggtactccatagtccaaaaacactgcccacaacatccattcttgaacattaacaatgtatgtcaaccaacaaaaagctctcggttatacacaaactggttcaatttttccctttaatcaaatattcctcaaagtgatttgacaatacaatcctcttttcatcaaatggctgtcaatagagtcagggaataagctggtcaagacccaaacaaactacaccagcaaatgtcaagacacagaactgaagtatttcagcaagcagacaagtcagaaggcacacacagatattttatcatagtttttctaccactactgagctaagcctgttagtcttacacaaaacttaaaacctacttaatattatttgttccaccaaagtaatcagagcttattcttagtaaacctttgtaaactataaacttttataaactataactgccacatagaatgtccaaataagataattttttcaggggctaggggttaaataataggtgatttttttcacaatcttaaaaaagaggattttcttctgcttaagtttcacatacatggatctaaaagaataaatcagaacctaaagtttctcttatatctaatcaattactatgtgcatacagccaaagcaaatccatagcttctttgagacagagctacataaaaattaattttagggcctattttagaagttccatttacaccaggtcttccttgtaacagaaggtgaatgaaaatgacactttccatttatatggagagtaattaaacaaactcatgtgagcagagcctgggttcttaccattatactgaaatgcaaaaaacaaaataagtagcattattatttcaactattattcacaactttaacaaacattaatggactaagtgtttcctttctaacccttgccaaatgttcatcacccatatccctgaaaactatgtatacactcaacaattcttccagaagactgggccagagtagtactacattccaaatgcttctcaatccctcaattactaaccaaacttttatattacacaaataataatagtcctatcatcttcaaatgatttctctatcatcaacctatcaatcaatcacatagcctagagtttattgaaagcttaaaaaagtgaagtgaaaatcactcagtcgtgtcaactctttgcaacctcatggactgtaccgtccatggaattctccaggccagaatactggagtgggtagaccttcccttctccaggggatcttcccatcccagggatcaaacccaggtctcccgtgttataggcggattctttaccagctgagccacaagggaagcctaagaatactgcagtgggtagcctatcctttctccagcgtatcccaaccaggaatcaaactggggtcacctgcattgcaggtggattctttaccagctgagcttaacctagcaattaatcacatagcctagagtttactgcaagcttgacaaaagactagtcaaaatgtcagtcttccattttattcattccataaattcagaattctccaagttgtatcattcatacatattttttagtctaatcaccataaaaagatagctgcacaaatcatttcttgatggcatattcttggaaaagcagaaaaatttattttggatcatttccttcaacaaatctctccacactttagactgtaatattaaagaacgtttttaagatttagaacattttttattttttttcttttttttttaaattaaatttatttatttatttatttttaatttttactttacaattctgtattggttttggcatagacattttttaaaaattcacaatttcaatattatcagcctttgctgaggtcctcttggcatgggccagatactataaagcacagggaacagaagaaggctgtgccagtcttcttgcccccaaggaattagaaagtagatgttctttcttttaatcaatttccatttgattctatgtccttttcactggcattttaaggattcatggaattggttacttgctttacatttctaagtagaaggcagataacagtatatcctaataaaccaagtatgtataccaggaaaaattctcagtaaatcctacaaaaatattcccatttagatatagtatccaaacaaaatgttctttaataaaaaatgaagtttggacttaactgactatatcatacaatacaatccaagaaaatttaatgttttacgaacccaaaaggaaataaaagtcttcaattattaacaattcttatgaacagtacaaatataatggattatgccttatattaacactttttaaaatatctcagaaattattaaaccggtatccaaataatcatagtatggaaaaaatagaaacttaacaagtttttctacaaaaaatgtcaaatatcctatcactcctagagcctttcacagtccccacagattttagcctctttggaaagtcctcatcatttctggagtttagaaaagagaccgaaaaatttttggtatggaagtaaagatgctcttgagtctaccaggtaattaacatcacacatgaaatgtaaaaaagaaaaaacaaaaaggctgtagaaatcacttcctattttgctttataatacaacaaaaaattaacaataattatctataacagtagttaacatttactttttagtacacttaattctactttctatatttctcaaattgtctaccatgaattggatttaacattttaaaaattcatttccttggagaaatggctgattcgagggctagagcatagaacacacaagataagcctggaacatcttgtaaggccaggaagtgggaaagggctcaaaacacaaaataatgtgggtatgtcaaaggtaaatggaagccaagtgatagagctgccaacagtcaaagcaaacacttggagcaacaaaataaacaatgtagtatggaatataacccaaagtataaaataaatatgtattgaggctatacttgtataaataaatgattaagtaaataaaggagaagagacgaatctcatattgtacatacataagtgttaacttaccaggcttgactgatgttctttgaaaggtttgctttgattggcccctggctaacatcaaggaacttaaattttaagaggggcccaccattcccagaggagaaggcaatggcaacccactccagtactcttgcctggaaaaatcccatggatggaggagcctggtaggctgcagtccatgcggtcgttagcagtccaacatgactgagcgacttcactctcacttttcactttcatgcattggagaaggacatggcaacccactccagtgttcttgcctgagaatcccagggacaggggagcctggtgggccgccgtctatggggttgcacagagtcggacacgactgaagcaacttagcagcagcagcgaccattcccagaactgaaaagagccgctcaattatgcctaaatttttggtacaaaaatatagtttatgctgaacaactgctttccttcagcaagtccaaaacggggtatgtgccatgtcagcagccccaataaaaatcctgtaatctgagtctataatgagcatcttttctatgaggagaaaaagaaagataaaggggaaaaaaaagattcaactggaacacagataaaacaaacagtatctaaaaaatacatttaatggctggtaccaggagaagattagagtctatggaagaaaagatcagtaagtatggagaaacggaaatattaactctacaaagtaaagtctaaatgataaaacaagggggaggaaatgcacaaagcctcagcgacctctggagcaatatcagatcgtctaatacatgttgtaatatgccaaccacatcctaagctaactgctggaaaccgacgacaaaagagaaaaatctcaagagcagttgaagaaaatgataaactacatacagtggaacaaagataaaaatgaacacgtttcatctgaaactatacaaagcagaagttgcaatgcaccctatcactgaaaagcttaaaactgatgacctataattctattatctggtgaaaatatcttgcaaagatcaagcaaaaacttttctgagacagacaaaaactgaaagaacttgtcaccagtagatctacatacaaaaaaatgttaacgaaagttctttaggcagaagagacaattataccggatgaaaacctgtataacctaaataataccatcgaaaacaagtgatggtaagtgtcagaaatggtacactagcaggaaggagaagaacttttgcttcttgttttaaattttctttatgttaattgactgcttaaagcaaaagtgtttaacaatctacaacaaaatcaggtttacactgtgtgtaaaaataaaacatttgactacaatagtacaaaggatgaaggggagaaacaagcgtaaagtttcaagatcctacagtctacataaaatgtactatcatttgaaagtagactacgatgaggtaaaattcattttttaaaccccagatttaaaacccctaattttattttaaaatttttaaataataagccaatagtagaataaattagaatactaaaaagcaaaggaggaggggaaaacagatgggacaaacagcaaacaactacaagatagatttaaacccaaccgtgtccctaattaaatataaacggtctaaccactgtgtgaaagcatcatgccaggtacaaaaaggataatttagtgaataaaacaaagcttgcgcccttgggaaggttgggatccaacggtgatgataaagagtaagtggtatgtgtgggtgtccatccctacttgctgtgtgcttagttgtctccgactctgggactcagtggactgtagccggccagcctcctctgtccacgggactctccaggcgagaatactggagggggttgccatgccctcctccagcggatcttcccaacccagggatcaaacccaggtctcccacattgcagcactggattctttacgatctgggccaccagggaagtccatgtcctacatatatacgtccagatacaaaataaccagttgtgagtaagtgatgtgacgctaataaagcacgtgtagtgacagagaaaaaaaaatcagagaaggcctagctaagatagagtgatcagggatggccactcacagggaacaatatcaaatatgagatctgttcagcagtggaccttcttctgaagaatgaattttatgcttaatccccaaaaggaagtcagactgaaatcaacgtaactctggctgaccagggttagagcatcagagccctagccacttgcctgaggagattctcaaagaatccctgaaatacaaataggccccccacaaaatactgagttctataaatggacgccataaggagctctaatcaagaacaaggtcagacagaccaacctgattagtgaaggggagaatggactttaaggagaacacagtgaaagctgatgggctatctatattgcttaggtaaggggtaaggactaaagagctaactagtatacaatcttagtggcttcccacgtggtgctagtggtgaagaatctgcctgccagtgcaggagacacaagagatgcaagttcgatccctgggtgggaaagatcccctagagaaggaaatggcaacccactctagtattcttgcctggaaaattccatggacacaggagcctggcaggctaatccatggggccgcaaagaattagacccaaatgagcacatacattcttagaataattcagaaaaaggaaataaaaatgggactaggaagacagatttcatttttctgaacaggtatttcttgatggatctggtgattgttagcatacagaagaaaaaaagaggcaaagctaaaatagtaaaaaaaaaaaaaaaaaaaaagtgacccttacacttaggtgactgggtggacagtggtactaaacatgggctggcaaggggtagtttgcaaggggtagcaaggagagttggggcaacataaatctcaagtctaaaagaggcatcagggctagaagcaagagaagaacaaagatagaagtacacagacagccactctcacaagtttcccagcttctccatttgtgaagggtgtaaacagagttcactacctccaagaacatgctagccaatactaaccacaaagtaacaaattcagctgaaaccaagaaaaataaaaacaagcaagagacaataatttaaaaatgaaataaacaaaagagtaatgatgggactcttcccctgaaatacaaggaccagaattccatctagatttctggagagaaaggattcaggtcgtgaccaaataaactacttattttagaagtataaatcaagtttctgaataatggtatataagagagtctctaataagaataagcttcagataatgtcacagattagatcaatacattagtgtattcacaagtttgcagcataaaagcaataaagaagccttttaactaagctctataacttggagagtggttacctatacagcaatatattattcaagaatgccataaggtataattactgttaccttcctgacacagggtattgattaatagcccaatttattcctagctttgaagttctttttatgtatttcacacgtaaaacaaaaaaactgcttcctttgcctaaaatgaagtagtccagaccctgtaatcatactttcttctctaccctcaaaaaccataccaatttgctatcatttggcccagtgctaagacattattatttcttgaattaaaacaaaaatctatttctgaatatatttaaaactgattcctgagttccttaagaactctagacatgagaaattaaatgtaatcgcctgaaattgcttttggaaaatacaggtaaaaaatccagatacaaagtttctagtcaaaaggttagttattggatttatattttttacaacatgcacaatgtatattcattggccccaaagaaactagaattcttactactaagatactttcattgtcagtacaggatatatagatgtactgagaagaaaaaagtgtatatgcattaaaactggtcaatcctactgggaaaatcactgcagatggcgagtgcagccatgaaattaaaagatgcttactccttggaaggaatgttatgaccaacctagacagcttattaaagagcagagacatcactttgccaacaaaggtctgtctagctaaggctatggtttttccagtggtcacgtatggatgtgagagttggactgtgaagaaagctgagtgccgaagaattgatgcttttgaactgtggtgttggagaagactcttgagagtcccttggactgcaaggagatccaaccagtccatcctaaaggagatcagtcctgggtgttcatcggaaggactgatgctaaagctgaaattccaatactttggccatctcatgcaaagagttgactcactggaaaagactctgatgatgggagggattgagggcaggaggagaaggggacgacagaggatgagatggctggatggcatcaccaactcaatggacatgagtctgagtgaactccaggagttggtgatggacagggaggcctggcgtgctgcgattcatggggttgcaaacaatcggacacgactgaacgactgatctgaactgaatgggaaaaataggtaaaattctatggaccataattgaaggtgaacttaagatgtattgcccaaagaagaacttttctgaatgtgaaaatgggcactagctagtaacaacatgtcagaacagagatgtaaaccattaactggccaaggtcaatggagaccaatggtcactttctccacgaagcaccatcacaaagcaaaggctcatgacttcctgccaacattgtctttctaaatttttcttacattgtcagtagcacaataagttttcaatgaactagaaatgtttattgttaaagccactttttaataccattcttacttttaaaacaaaagggtgaattggcaaggctgtaataaagaatacgaaaggaaaggaagtaccaaactgcagaggcaaccaaatgtaaagacaaaagttacacttaggaagtagagtaccagcaattttaggaagatgaagagattgttcacggtaattaaatgggcaagcctgaaacccaggaaacgtttatgaatgatcaatcttaatcacaatgtattatactgtattaaaaactaatttggaagaacctaccttcgtaaggtttatattctttaaaacctcattctaaaccttgtaaatcagaacccacttctttataagattccctaggtcattcttaagcacagtaaagcttaagaagagctaattttaagatatattaatataaaatataagatatactgatataaaattatcttgcttatatcattttttagcacatctcttattttaaaataatagcacatatttatttaaaaatagagattaagaaaattcagagccctaagatataataaattttctgcattccttataaagagctttttagagttctttttaaagtttctagaaatatatgccagtttatacttctcaagaacagtgtaagagatcactggatggcttacctaaccttaaacaatcactctttagaaacagaaattctgtcaaaaaatgtatgtgtgtgtgtgctcagtcatgtccaaccctttgcggccccatggactgcagcctgccaggctcctctgcccatggaattttccaggcacaaatactggagtgagttgccatttcctaccccagggatctgcctgacctagggactgaagccatgtttcttgcatctcctgcactggcaggcagattctttaccactagcaccatgtgggaagcatcaaaagtttaaataaaagtagactttaaaattcagttaatgtgccagtaatttacatctataatatttaaaattattttatattattacttaacagtttgaataaatcaatgatagaatgttcactttgctgatatggcgtttggtaaaacaattctcaaaggcggactgatccccgtcttgatcaccatctgtctttaaagaatccttgtattctaaaaaaagaaatatgcaatggattacctttagagttaatttattctatttaaaaaatgactaggtttaaaaaaccttatggctaaagtaaggcaaggtacatattctatccacatatgtagcaggatggggtgctaaaggtggttggaaagtacaggtatagcctagtagacaatgagttccattatggaaaggtccataaaacaagatgattgataaaaagcaactattttagaactccacatcagggtattaagggcatacagaaaatctgttaagccaacaactgttatctttaaagaatgaaccatctggccttccacaaatagagaatcaaaaaaaatttttttaactgaagaatctttagagatcttgaaacatagtccctcaaatcttagatgagacaactgaagcccagggaggataaatgatataattggatccaaatcaaattaatgaatatttaatgaatacctactgtggataacacactattccaagagttacagaaagtaagtataacagtggagcccttcttcaagcagtccgttctctacttcccaggtaaatcacctgtatgtagctctctgatgttagcaacatccttttccacattctagcttagggccggaacacttaggtccctagaccaaatctggttcattgcttgtactgaaacacagccacacacattctttcaccatccaggcttcttttgctctacagagtcaaagctaaacagttatgacagagacttatggcccccagatcctaaaatatttactacctggctcttcccagaaaaagcttgccaatctctagtctagatcactttttgctttgatttgaaggtgttttttcccccaccttttttccttttcaaactaatggaaggctggttttgcctcaggaaccactgcccactgagcaatgtgctagatggttttgaaggaaaaagtcagtgagctaaatatggcaactgacagcagctctccataacaagtgaaaacttgctctggcacataaaggacaagaatcaaaggacagaagactcttaactttcaaccaacatttaataagtgcttactaagtgcctgccatggggctaagctctggggctacccacatagataagaccaacttagttctcaaagaattcactacttagaaaaagaggcaacacttttatattgaatggaataacagaagctagtggacaaagacagagaatagttaactgaggttaggggtgacagcaactagctaaccccaagaacaaccacacagagacttctatttcccctaccgagttccagctgcaggaagtaagcatgattagaaacttatagctagattgttgcctcaacccaaaggccacaacttataggtgggtggagttaacccttggactggatgttgcttcctgaattccctttatagcacactttatttttgtttaacctttctagtataattcttttagttacattttaaatttacattcagctttagtcatcttaacctgctctgctgtgcatgttttaacctctatattctttttcagaatcttccaatatggatattattttttatccatttttcatctttttatgcattatttctaatatttgtttatatttttcttatccccttttgtttcaactattttatcttaaacacgctattttctgccttttgtttctctaactgagaataagcaggagtgatgatcaaaatagccaccaggaaagtatggtactgaacaatggaaccagctcagcctcagagtggaggtgggtccagggaccctggtgtggcgaggactcactgattagtttatgaaacttgaggtggtcaaggtcttcccttacagctcagttggtaaagaatccacctgcaatgcaggagatcccagttcgattcctaagttgggaagatccttgggagaaaggatcgtctacccactccagtattcttgggcttcccttgtggctcagctggtaaagaatctgtctgcaatgcaggagacctgggttcagtccctgggtttggaagatcccctggagaagggaaaggctaagggggtcctggggtagggcaggagggctgagactgcaggaacacttggggaaggatgtggctatagctgaatatcaactgatagtagaaactgcagtgttttaacaaccggtatcaccataccagtgttgatactagatcaacatcagttctgtgattaggaaaacaacagagtaagtgggatagagaagaaatcattgcaggcctcttaaaaatggaaacagatacatctctatttcagctaattttcttgcaagtcctttctaaaaggacattacaggcggacttctaaaagtctttctaaaagccaaagaagtaaagacattgcccctaattctagccacatttaactgccccgattttcaaaaatatatatccatgtaatttgaggagacagttcaaaattacccttcttaagaagtcttaggtgaactttaaaaacagccaagagaaactactgaagtaatactgttacaccaacttctaaaaaccttcatatctgaatcacaagaccatttggccgtagctatttggaagagtgcacattatagacaaagaaggaaagcacaggagaaggtgttgcaactcaagctcccatgatctgtcatgaagctataaatcacatgctaaaatggttcagaattatgcacaatgaaagacctagatccaaattcctagaatgctttctatgatggaatgctccaaagataaattctagctaaactgattcatctacctccaagtcaaaaatccaaaattctttgtaaacaatagtagccaccatgtatggaactgtgtatcaatttcattgccatttttggtaatcttaaaaacaatgctacatagaaaatatcattcaaattgacaggtgaagtcaactggcttagagagattaagtagcctgttcaaggacacatagccagtcaccagtggagctcagctcaggttagatcaaagcccccactcgactctgttctaaatacttcactgcctctctcctctcacacttggaggtctttccaatatcacttctctctcataagaattctcatagactcagagaaggcttgaaagtaaccacccacaagatttctcctacaaccttcagtaagtactgcctgaaaagtaaccaaaggcccacttaaggaagcagtcctacttgatttcaggacaagaccctgacgctggggaaggttgagggcaggaggagaagtcggggacagaagatgaattgtttggaaggaatcactcactcaatggacatgagtttgagcaagctcagggaaatggtggacagggaagcctggcgtgctgcagtccacagggtcacaaagagttgtacatggcttagttactgaaaaataacaacaatgaaaagctcagcacttccaaatcccatttgcataaaaaagaattcttgaactccttcagacacttacacatgaaaacaagctatcatttgggtcaaatcagaaattctaaagcagactgaaaatgacctggagctcaagttcttccatgatactactgcgcccaacaatcttttaatgacatctgaatttcaaaggattctccatctcttttggtctgttagcatttgaaatggcaaaagaaaaacttcatctcgattttctcacaagacgttctctaaattccatattaataatctagtctttgatgaacacttagaacactctttactcatctcattcccatcttaaaggaagctggtctgccatggtattcctctacccaatacaggctgtatcaaacaaaagcaagttattcaagtgacataaaatctaaccactgagagcaatggttcgacaaaaacaaaactaaaaaggtcacttattaagaaaatccagttggtaatagttagcatcccccattcttcactagtcacttcttcactagtcagttcagttgctcagtcatgtctgactctttgtgaacccatggactgcagcacaccagctatccatccctgtccatcaccaactcccagagtttactccaactcatgtccattgaggaggtgatgccatccaaccatctcatcctctgttgtccccttctcctcccaccttcaatctttcccagcatcagggtcttttcaaatgagtcagttcttcgcatcaggtggccaaaggattggagtttcaacttcagcaccagtcctttcgatgaacactcagactgacttcctttaggatggactagttggatctccttgcagtccaagggactctcaagagtcttctccaacaccacagttcaaaaccatcaattcttcagcgttaagctttctttatagtccaactctcacatccatattgaccactggaaaaaccatagccttgactagacggacctttgttggcaaagtaatgtctctgctctttaataagctgtctaggttggtcatacggagaaggcaatggcaccccactctaggactcttgcctggaaaatcccatggacggaggagcctcataggctgcagtccacggggtcccgaagagtcagacatgcctgagcgacttcactttcacttttcacttttatgcactggagaaggaaatggcaacccactccagtgttcttgcctggagaatcccagggacgggggagcctggtgcgctgccgtctatggggtcgcacagagtcagacacgactgaaacgccttagcagcagcagcaggttggtcataacttttcttccaaggagtaagtgtcttttaatttcacggctacagtcaccatctgcagtgattttggagcccccaaacataaagtctcttactgtttgcattgtttccccatttatttgccatgaaatgatgggaccagatgctattatcttaaaagttttctgaatgttgagttttaagccaacttttttcaactctcctctttcactttcatcaagaggctctttagttcttcttcactttctgccataagggtggtgtcatctatatatctgaggttactgatatttctcccagcaatcttgattccagcttgtgcttcatccagcccagcatttctcatgatgtactctgcatataagttaaataagcagggtgacaatatacagccttgacatactcctttcctgatttggaaccagtctgtcgttccatgtccggttctaactgttgcttctttacctgcatacagatttctcaggaggaaggtcaggtagtctggaatacacatctctttaagaattttccagagtttgttgtaatccacagtcaaagcctttgacatagtcaataaagcagaagtaggtattttcctggaactctctcagtttttgatgatccagtggatgttggcaatttgatctctggttcctctgccttttctaaaaccagcttgaacacccggaagttcacagttcatgtactattaaagcctggtttggagaattttgatctttaatttgttagtgtgtgagatgagtgcaattatgtggtagtttgaacattctttagtattgcctttctatgggattgaaatgaaaactgactttttccagtcctgtggccactgctgagttttccaaatttgctagcatattgagtgcagcactttcacagcatcatcttttaggatttgaaatagctcaactagaattccatcacttccactagctttgttcatagtgatgcttcctcacttgacttcacattctaggacatctggctctaggtgagtgatcataccattgtgattatctgggtcatgaagataattttggacagttcttctgtgtattcttgccatgtcttcttaatatcttctgcttctgttaggtccataccatttctgtcccttactgagcccatctttgcaggaagttcccttggtatgtctaattttcttgaagagatctctagtcttttccattctattgttttcctctgtttctttgcattgatcactgaggaaggctttcttatctctccttgctattctttggaactctgcattcaaatgggtatatcgttacttttctcttttgccttttacttctcttgttttcatagctatttgtaagggctcctcagacaaccattttccctttttgtatttctttttcttgggaatggttctgatcaatgtctcttatacaatgtcacaaacctccgtccatggttcttcaggcattctatcagatctaatcccttgaatctatttgtcacttccactgtataatcattagggatttgatttaggtcatacctgaatggtctagtggttttccctactttcttcaatttaagtctgaatttggcaataaggagttcatgatcagagccacagtcagctcccagtcttgtttttgttgactgtatagggcttctccatctttggctgcaaagaatataatcaatctgattttggtgttgaccatctggtgatgtccatgtgtagagtcttctcttgtgttattggaagagggtgttcccaaagaccagtgcattttcttggcaacactgttagcctttgacctgcttcatgctgtacttcaaggccaatttacccattactccagatatttcttgacttcctacttttgcattccagtcccctataatgaaaaggatatctttttggggtgttggttctagaaggtcttgtaggtcttcataaaactgttcaactccttaaaactcaacctaaaagcatttggaattttataactagtgctacattttgatttcttcctcctagggaactatgctgaacacctcaagagagatataccagcgttctatttaaatgtttatattccatgaagttattaacactttgtaatgaaatgaaaatggtatcttaatgtgagcctcaattgtttttactaaagtcatgtgaaacagctatatacttaatcagcttacctaaccagagtgttataaaaataattatcaactgttcattaaagtgcaacaaaggatctgaaagagatgcagatacatcaaaattacagtattttcctattgaaatatcactcttaattaaaatgaaagcaccaaaagaaaaaagtatgtgttccttagtggaacaatcaatcttgatagatatactagtgttttaaaaaatatttcatacataaagattcaaaaacatcaaacacagccatgatgtagagtaaaaggacagtggcattactgtatcacttggtagccaagaaacctcaaataatttggttaagccttcctgaacttctaaaattttgtgtaacaacatatcttacaggattttcatgaggacttagataacatctgcttgctgctgctgctaagttgcttcagtcatgtccgactctgtgcgaccccacagatgtaagcccaccaggctcccccgtccctggggtctccaggcaagaacactggagtgggttgccatttccttctccagtgcatgaaagcaaaaagttaaagtgaagtcgctcagtcgtgtctgactcttaggaaccccatggactgcagcctaccaggctcctctgtctatgggattttccaggcaaaagtactggagtgggttgccagtgccttctccaacatctgcttatttaaccaatatttattgagcaactattatattccaaaccctgaaacacatcagtagacagagcaaagtccaatgctcaacttatattttatttgaggggaaaaaagagagaggtatgcattaaatgggtagacaaatgagaccatttaagtaattggtaaattagagcaagaaaacaagacccagaataataaggtgctcaaataatgttgatacatactcaattctgctcaatttctcattatctctgttcttggtgaattataaaactcagccataatatatttacactcacttcttgactataaacagaatgaacaacaagaaaatcaaggttgattccatctgaataaaaataacccaaccctggagatacaaggattttgcagctgttacaacagaagcctgtgaaaacacactgcctgattcttaggatctgactcatacctatgcctaacattcattctccttcaatggtcagtcaacactgtagtatattctgaatcagtgaagcgcattttcccctcaccaactcttatgcctgaagatgaatattaatattagtagaactggcatgaataatatctatcagaaaatcagcctttgattacataattaggactctacacaaaaagtatacagatatttgaggatttatgaataagattatataacatgaacacaggaaaattgtaattccttttcctcattaaggaaataggttagcaaataaaggatttactttgttacaacaaatttacaacattatacagccatataaagtagagtctctttactgtaagttgcaactgttagctaatcatttaatcaaatagctccattacagtaggaatcaggagggaaaaaatcaataggtctactaaaggttttaacttaaacataaaatccatgtttattccctagctttctgatgtagtgccttgtctcttaaggtgaatttgctgattactcaattactgtctttctcgtctagattccagtccatgtatatcacctatgataactcagtctcaatttcttcaaagtggagtgggaagttaaagggctctaagggcaaaatccttcttgaacacttctctgacctacgtgtaatttaaaacaaattttcttgaggaattcacttctgtggagtatgaccaaagtattcaactttgtttataccaaaataactttcttttcagcctcagattttcctgagttatgtgatacctaattaaaatacatgatcacaattacaagtataattggcataaacaagtttggttgaaaacacaagtcttggtaagcccacaactaaacttgtcaggagcagaagtggtggcaggggacttaaatggtgtacagtgtactacaagcaattgttaatatattctacagagaaatagaagattttaggtaaattcagtgggttgtttgagaatttctatcaacttttaaaacatcaggtcagttaatgtttagggaaagttgaaaaaatgaaaaaatttatcaaaagcaaagaaaaatgttcttcaaaatatcaacccctgcaaatatgcatatttttgttaaagaaaccataaacatctataaatacttctggagttaaaagacacaaggtcaatttctatatactgcaaacttattctcaatttgtcctctcacaaaagtacaattatcaatccatatgattgatcaaatccaatctaaattccttagaaataacttttttttattttgaatgaacaatgaaaaaaggtggaaacaactgacccaagtacaaagctatgagattacataccagtttttctctaaaagagtactttcttctttgccctactgatatgaaatctcttcatactcttggtttctcctttcattagcaaaactgtaacaccctttaaaagaactgtacccagttctttgcatcacttctgaataaactattgcattatctctatcccagaaccaccagcaaacaggaggtaaaatttattcatgctgagctgcaagtaatcaatgtgtagactggtgttaatcatgtgcacagactggtgtaaaacatagtatcaaattttgagattaagaaaaggactttattggttaagtgaaatttaagaaaccaaatctttttacagatattgccaaaaaagtccattaaattaattttaataatcatttcctaaaattgagatttatttttgaagagaaaaacgaggtaagagcaattccacaaaggacttgtagcctctgaaatgtcaaacaacagattcttcagttgtttcagttccataattttgctttattttgactgattggtaaaaaagatatacagtaaagaaagtcttttaactggcaaatcgaatgtttttttgcaaattaatataaattataaaatctcattattataatttataacatatatactatatccaaaaatatgtaaaatagtcttttaaaataaaaaaggagccatattaaactaatgggcataggatattacatttaaacacaggtcccttatatatgagtttgagcaagctctgagagctggtgatggacagagaagcctggagtgctgcagtccgtggggctgcaaagagtcggacatgactgagcgactaaactgaactgacagtgaagaaagcaattaaatggttcaagattgaaagctaaagactaaatttctaataacataaataaccatacactaacatattcatattgcttatttatgcatatctacattatcgaacacaaaactaactgctgaatgattcacagattttaattgaaattaagagtcactttattttgggggctccaaaatcatggcagatggtgattgcagccatgaaattaaaagacgcttactccttggaagaaagctatgacaaatctagacagcatattaaaaagcagaaacattactttgccaacaaagttccgtctagtcaaagctatggtttttccagtagtcatgtatgcatgtgagagttggactataaagaaggctgagcaccaaagaattgatgcttttaaatcgtggtgttggagaagactcttgagagtctcttggcctgcaagaagattcaaccagtcgatcctaaaggaaatcaaccctgaatattcactggaaggactgatgctaaagctgaaactccaatactttggacaccagatgcaaagaactgactcatctgaaaagaccccgatgctgggaaagattgaaggcgggaggagaaggggacgacagaggatgaggtagttggatggcatcaccgactcaatggacatgagtttgaataagctccaggagttggcgatggacagggaagactggcgtgctgcagtccatggcgtcgcaaagagtcagacacgactgacactgaactgaactgaactgaagtggtctcacctccattttatacactcaaatgagtgaagagtataaaaaaactaacttctactaccagtacattctagatatcaatatttaattcttcttaaaatttccttctcttttcttctacataatattttaacagaaagtatggtttcttctaaatgactctgtttttcaaactgacaagaaatagtattaaggagaatacaaagaaatagggatactgccctggggagcttaaactgaaatatctttgaaaggtaacttggcattgtctatcaaaattttcaaggcacacagaaatttatactaagaagcaatcatacaaaggcataaagtaatacgataagtggataatacataaaaaataaatggatatttattagataattacttctaataattaacaactaaagtcactctaagtgttcatcaataagggactgattgaataaactattgtatcacacaatggagtgcatagtttaaatgagacagaaaaatgtttatgaggcattaaatgaaaaagcaagtatcaaaacagtttagatagtaaatcatttttaaattatataaataaaatgcataagtgcatattaaatatacatggaaaacagctgtaagaatatatgtgaaactttcaaaggatttagagaaaatcttttctttctactaaatattatgttaatttatatgagcagttaaatattccctataataaaaatcaataatcataaagaacattttaatatcttaaagtgttttaatcaaaatattaaagcacacatttttcttcatcttcctaaagattttctttttaaaaaaatattttctagctactatatgcatatatgattgttctcctaacacatgagtaccatgctctcaaactttaaaatgcattatattcaactttgcagaattatatgaaacaaaggtactgtgacacaaaataatcacaatcatattcaaagtcgtgggtttttttttttttatagttcacctcaaatactctttatcttttagaacaaaagaatggaacttttaaaaaaagtgatttctgtaatgatagataaacctcagtatcttctttttcacttatatatcctaaaggttgcaacagtaacatttttgtcaataagcataatcaaaatattttccacaatcattaaactcttaacttcattaatggctttatcttgatctgcagcaatcaatatttctccatctcaactagaagcaatcaatatttctccatctaaatcctaagcaaaatttcagatactaaaaacatttatgccaactatatatttactctattaaaaattttttttaatatttaaacttaattttcaaataaagagttatgcttactagaatacataattgtaaaaataattttattttctaaaatactttttactaaaagattgaaaacacatctttactttacctagttgttgatgttggtgtttgtcataatgactgtgacagaaatgggttccaccttcctgatctactgtcttctctgacgaaagcaaaccgagacgtttcaatttcagtaatcttggagaactttcctgaaaactctctccagggcccaaaaccatatctcccgaaacaacaggaggaacaactcttttcaaaaaatccatattaaggttcttctacattactggacccacaagtacacagacaagtatttgtaccaacttcctcaatgagaagcttaggtccactctttgtgtcaaagagcaaagaaacgtcatatgaacttaggtgggtcaactaccagctgttttgaagctgatttttaggacatttgctgttcatactgataagaagtgaaacagctaccagctgtgaaactgcacttcatatatacatatataagtacatgtacaatgggtgggaacagcaatattgagactataaaatggttagcatccatctagtttaacgtttagactttgaaaacctacactgtgataatgttaggacaaatttactttggtctgaggtgtgtcttacttttaaacacacttaacagctgaaatgtgaaacagtaacttgaattcaaaagataattcttatcattccggaaattcactagcagactgcaggaggatcaagttttatagaaggtgaaaaggagtaatttaaaactatactgtatcatcaacatcccaatgtacttttatttttattttattttctgctgctgtggttctgctttactttctggtggttgtttcatttaaaagtttatcttttctaatacatctgtgctggtggtggtttagtcaccaagtcatgtccgactcttacaaccccatggactgtagccttccaggctcctctgtccatgggaattctccaggcaagaacactgaagtgggttgccatttccttctccagggaatcttcctgacccagtaatgaaagccaggtctcctgcactgcagacagattctttaccaatctttaccaatgtacttttaaacacacaccaaaaaaacttgttcattataatcaatcataagttacaatcttaaaaccataagttatctaaaaaaaaattgataatttaaaatatatgaacctaagaaaataaaattgaacagtttaaagtataaatatttaattcaataaacccagtaatcaaccttacataatttatttccaaataactaagcatcctattaaatattttaaaatagcaaaagtaactgatcctactgccttattgtaatccagaagcatgataaaatgtgccagtgaaaggtactaaataagactgtgcactttaatatcttcttttctccctttctttgcctgccctctggtggggttactaagtgaccaagaaagaaatgaaaacaaacaaaatgaacagataagacataaacttccctaagtagtcaaattgataactttgaaggatacacacttaagagaaaaaaaacaaacctgattcatttagtgaaacacaatctttttcttccagcactcagtaggaagagaatgatctacatatattaaaagatgaagcataaagttgtctacatagatatcaaggaaattgctgtatatataaaaacaagtaaatttctggtctgaattgtgctgtgcttagtcgctcagttatgtccaactctttgcgaccccatggagtataacccaccaggctcctctgtccatggggattctccaggcaagaacactggagtgggttgccatgccctcctccaggggatctacccaacccagggatcgaacccaagtctccagcattgcaggcagattctttactatctgagccaccaaggtctgaatagatgagtttttaatccttaacattaataatgaagtcaattattctctatttcattcatttaaaagatattaagtaaaaatcctctatacataaagcattaatatattattaaggttcagaggaaatttagaggatttattcatgcaaatcctgtctcatggaattctacagtaaaaaggagggaaaaaaaacaaggaagtcaagtaaaggactcaagtttctcgccctaaagcaagactataccaactagaaagaaacactgacttaaaaaaaatccttctcagaagtagattctctcttaaccctggagcacagaaggataaagattcatatatgatcatcctattgccaacacactgtaaaaacaaactagttagaaccataatccatgtcctttaataacctagaagttatccctatatcttcccaggtttttatttttgtttcttccatctcacctcattcatattttttaaactgaaggacaactggcttatattagtttcaggtgtgcaagatagtggtttgacatttttatatagataattatgaaatgatcaccatggtaagtctagttaccacctgtcacacacacagcattactacaatattactgactatattcctatgctatacattacatctccatgacttattttataactaaaaatttgtacctcttgatctccctcaccctatctcacccatatccccatgccctcccctttggcaagcccctgtttgttctctgtgtctatgagctatttctgatttatttgtgttacttttttttgtttttgagattccacatataacgaaatcacatggtatttatattcctctgtctgacttactttacttaacataataccctctagatccatgctggccttttgtttgcttcctctttactgatatggtctcttgttctttaaaacttagttcaagtcccttgtgtccaactctttgcgaccccatggactatacacagtccatggaattctccaggccagaatactgaagtgggtagcctttcccttctccaggggatcttcccaacccagggattgaactcaggtctcccacattgcaggtggattctttaccagctgagccacaagggaaccccaagaatagtggagtgggtagtctatcccttctcctcgaaccaggatctcatatactgcaggccgattctttaccaactgagctacaagggaagccagcacatagaaacttatgtgtgttgtttttctcaggtccctttgtaggtcttccttatctgtggagcccaggaatacagtagtatgcaacaaacacatgctgattatgaaggcaagttaccttcatgtttgttcatgatatacaagacaaccacacatgtcactgttaacctcactgttctaaactacactttcagttggaaaaagaaagggcaagggttaggtgatataggagagaccacaagatttttttttcagatttccttcttttaacaactgtttgctgagtagcttctttaatagcctgtgcatgatgcaaatgcactaaggatttatcttcatccccaggaagcttaactctcacaactacaagactccctgtttggcttggccaaggttttgttgagcctgcaatatgcttcaatttcttctgtccaataacgtcctttctttgcaggtgtggattcctaataaacatctaggagccaaactccttttcagtgtcagcttttggaggaccatccctgagacataacagcgaggtataaagcatgggcctgcaatatccattactagctgaatctatgacggcgaaatgccataaagctatttctaagatctttggttgattatcaaaactttgaactcttgctataacagttaaagaattaagaaattatagcagttataaattataactaacagggctagtcattcaaagacagcatttaaaaatcttttgagatctgtaagtcactatttcgcctttagaatatttattatgatcttaccgtagaattcaagacaataatttcttggtggtaagctggatcatttaatcctggctgtgggactcttcagcagttttgagaattaagcagttaggtgttaatcatccaagattaaataaatggcttcagctctgaagaaaaacaaaatatgagattgatacattagacatgtttataagtacatctgtgtgtgactcacatccacccttacttatgaatatattatactgcagggtcactagctgctacagttatcctctttcaattagtgttatgttttttctaagtttttattatgacaattttcaaactaattcaaaattattgagactattatgatgaacccactcctatcaactcatggcaaatcctattgcatttacatcttcacctacccctcaacctctatcccaccactctaggtcattctgaagcaaattccaggcattataccactttatctatagaccattctgtatgtctctttctaagacaaagatttgctttataaacataaggcagtatcattgtaatatctacaattaattcacaataatttctttattacatcaactaccaatcagtgctcatatttctccaactgtctcataagtgtctaactcaaagctaaacaaaatccatacaggcaactgttactgtttctcctaaatcccttttaatctacagttggttttttttttccccttccattcttctctttgcagcaacaaacaaagcttttactagacaaaaattgaacaaatacatcaataccctaactgtttaataataaattaaatccattttcattttattcaccaaaataatcaaattttcaaaatagttcatatatccactaggcctaatattattccatctgcagacagtgtttatggtacacatttttcaaagtccaactataataactctgagcaggtcctggattatgaactactataccttatatgtaataatttgatgactactaagaatgaaaccaatgaccagaaggagttatcctttaactgcatataaggcctcacatgcaatcaaatacatttcatgtttgtagtaccatgaaaggttgtgcatttttcaataggccacattttaaatttgtcattgaaccacaaatcaatctcattttaaatcacatcctgtttctattttcttgtttaatgaatttaattcccagccccaaagaaagaactacttcctaaaatactaattgtgtacttaaaagttcttaacctgaaattcctttagccaagttagaaaaatataaaaatatttcatttattcacaagcataatcagctaaattatgactaaaaccaaatctctgaagccccaaactggtaaatatgaaaatactaatttaatatagatgtacttgttcataatcaattatcattcagacttatgaatttttaactgcctcaccaaatatttctgcatctactaacaacatggtatctacaatcccaccataacttttgatactttatcttagtttcatggaatcatttctccctcaaagcaaataaaatttatgtgacaaacagcatatcatttcttgcctacagtgagcagagcagtcatgcactggtctgtatttaatgaaatttataccatttttgttttgttcaggggtagtatgggggtttttgttggtggtgatgggtttttttgggggggggcaggtcaattgtacttttatgttctctccatatagactacctaaaatggaacttttattttcatttcacttgattaatttggagaatagtttatctataagaagagtagtttttttgggggggttcacattccacagcacatgtgtccttagtttcctgaccagggattgaaaccacaacccctgcactggaaggcagagtcttaaccactggaccactggggaagccctgaaaagaataaattttattactacttctatacaactacttttgagatggtcaaggtcagagaggtcaggtaactgcggtcatggtatgcacatgaccgatcctgttgtttcttattttaaaagaataagctcgtatttaacaagagtgacttaaggaggtcagatggcatttgacaacactgaaaagaagactgtaaattagtcaaatagcacaagctttaaagattcaaggctttaaatcagcaataagactaaggatctagaaccttccatgtgtaataaagagaacagtggcccagctctgcttggaaggattctcagatcaaatgaggtccttaagggacaactctgtttcactttagtctagaaagtaaaagagaaagttgaataggtgctcaggtaacatattaacctcatttcctttctgaaaaggattacaagaataatgaagaaaagaaatgccacaaatctaatataccctagctgtagtaaaacttctgacataaaaatctctgatatacattgatgcagaaaattataatcttgaacaaatagagcagaaattaagaaaaaatgagtttcagtaatgttcaatgtaagtactctcaatatttacaggcttggaatacttcataatctgaaaacgagaacaagaagttatggttccaagcacaaggtaaacttgagctcaatataataaaaagaataacttaattattatatgattcatttaaaacctgcttcataaagaaatggagttcctgctgagtttttaggtaaagattgttagaaatgctatagaaagggttataccactggtcaaaagactaagataaattacttcatattccaacttgaaatcctaaatttcactttaatatatattttgtacttatacttgaatactgggaagtgtggtgacctaaagattcaatcatatttcaactaaagaaagaaaccacaatgtaagatattaaacctataacagaaaacttcagtctttctattaaaattattctgggaatattggaagacctctttaaatgatgcaaaagaccaaaatgatgcaatgattttcaaataatttagaataatcatagctcctatctataatggcaaaataagtatgaaaaatggaaaatgaaatatttttttaatctgccaaagattatggaagatgtgaaaaatctatgcacaaagactcaagtgtaggtagcaaataattactcaaattatcctctttgtctgactgacaaaagttattaaaataaagaatttatagtcatccctttaattaagaaagaaaattaatgattcataaaccaacactgactccactacactaatttttagaaattcattttttcttactttataaatgttttaatttttacaatatctaaaacaaacctgcattttaatcttctgtcattctttttaaccttctaccaaatttcaacttttaagaagtatggaaacttacgatgctgactaatgcaagcatggattacacaatatcacctgctaaaaatgctgtataatggcactgagctagaataattgggctcactgcaaaaatctaaatctcttgctgataaagcaatgttctctgcaggtaaatttttctatattttgttgattttacatttttagcgaaaataacaattatcatactacttgtattaatgaaaacaattaggaaaattttccattcataaattcgaagggaaggtttctgtaacagtttcattcactgaatcatacagacatagccccaaagtacattttctagtaaactggtgaatgaacatgtattgtttagaataattttccttttacatttctacagcattacatttctatagtatttctaacccattcaacagcatttctgttggcacaggaaaaaaaaaaaaaaagaactagatcacaaaactatcatataagtcccctgctgctgctgctgctaagtggcttcagtcgtgtccaactctgtgcgaccccacagacggcagcccaccaggctcccccgtccctgggattctccaggcaagaacactggactgggttgccatttccttctccaatgcatgaaagtgagaagtaaaagtgaagttgctcagtcgtgtccgactcttcgcgaccccatggactgcagcctaccaggctcctccgcccatggggttttccaggcaagagtactggagtggggtgtcatcaccttctccatataagtgccctacctactcatttagacttaaataagaagaaaatttttggacaaatgtagaaacaacccagtaagacatcatgtcactaaatctggaattttctcccatccctaatttctaaaaatccattgctgtaacgatgtatgccacacatgaatttataaaaatcatacctttaacaaatattgagcagaactatatgccaagaatcagggacagaagagtgaacagaagagacaaaaatccctaggctcacagggcttaccttccagtatcagcttgaattttttgtagtccttcctttgagaatctgaaaaaagtattggcggcctctacttccaaaatgtaaacacagtgaatcttgcagggttatgaacctctataatccaattactaattatggattaaaaatccccgataaaaactctccttatgcttactttctgtctgccatttatagttgacagtgtcataattttactattcatagtattaagaagtaatacagtcatccttctgtatacaggagataatggttccaggactccttgtggaaaccaaaagcatcagatgctcaagtcttttatataaaagtttatagtatgtataaataacccacgcaaatcctcctatgtgctttaaaccctctctatattcagttcagttcagttgctcagtcgtgtccgactctttgcgacgccatgaattgcagcacgccaggcctccctgtccatcaccaactcccagagttcactcagactcacatccatcgagtcagtgatgccatccagccatctcatcctcagtcgtccccttctcctcctgtccccaatccctcccagcatcagagtcttttcccatgagtcaactcttcgcatgaggtggccaaaggactggagtttcagctttagcatcattccttccaaagaaatcccagggctgatctccttcagaatggactggttggatctccttgcagtccaagggactctcaagagttttctccaacaccacagttcaaaagcatcaattcttccgcactcagccttcttcacagtccaactctcacatccatacatgaccactggaaaaaccatagccttgactagagggaccttagtcggcaaagtaatgtctttgcttttgaatatactatctaggttggtcataacttttcttccaaggagtaagcgtcttttaatttcatggctgcagtcaccatctgcagtgattctggagcccccaaaaataaaagtctgacaccgtttccactgtttccccatctatttcccatgaaatgatgggaccagatgccatgatcttcattttctgaatgttgagctttaagccaactttttcactctcctctttcactttcatcaagaggctttttagttcctcttcactttttgccataagggtggtgtcatctgcgtatctgaggttattgatatttctcccggcaatcttcattccagcttgtgcttcatccagcccagtgtttctcatgatgtactctgcatagaagttaaataagcagggtgacaatatacagccttaacgtactccttttcctatttggaaccagtctgttgttccatgtccagttctaactgttgcttcctgacctgcatacagatttctcaaaaggcaggtcaggtggtctggtattcccatctctttcagaattttccacagttgattgtgatccacacagtcaaaggctttggcatagtcaataaagcagaaatagatgtttttctggaactcgcctgctttttccatgatccagcagatgttggcaatttgatctctggttcctctgctttttctaaaaccagcttgaacatctggaaattcatggttcacgtattgctgaagcctggcttggagaattttgagcatgactttactagcatgtgacatgagtgcaattgtgcagtagtttgagcattctgtggcattgcctttct

SEQ ID NO: 232 - DNA, 231713 bp, Hippotragus leucophaeus
  source 1..231713: mol_type = genomic DNA
cccactctgtgtcccagccccactgcgcacccggggtgtgcaggggcaggccagcgccggagcggctgactcttctctgaaaaagaaataagctacaggatgagttgagtggtttacacggagactgtggaattgtggggaatcaccaaaccgtaagcaccagttttaatcaagtttgttttgtgtcgtgagatctttgattttcattttgttttcctcgggtcggctcgctcggcaggcggctctgccccgagcccccgcgggctccctccctccgcggctgccctggggggcccggagcgcccgctcccgcacgtccgtgtgtcggcgcgtcccggcgtctgcccgggtccggcaggcagagggccgccggctgcggctcgccccgccgcgcccgcgggctcggaggaggccggcaggacgcagggcggcagcaacgtttctcggcggagcttcaagacggagacagacaaacaagagacccgcatctgcgggagcggctacagaggcggctcctcttccatgggctcctcgtcggctctgctggggcggcagcagaggagagggtgggtgtgcgaggttgccgccaccccagccccgactcctagctatctctgccccccaaccccgagccaccgccacccccacctagctcccccgcccccgactcctagccaccccgccccccgctcctagccaccccgccccctaaactcccagtgacccccgcttttcccctagggaagtgttccttctggcccagacgcccttcaagagtttctcaggctcttgcttctggaaagaggtgtggtgcagtctgccctggggccagggtgaggccctgctgagctcacccactcccagccctgctgagctagcactgcccccagtacacccgggagcaaagacccgggtcacccgcagatggcggcagcacccacagccggccagggtccgtgctcacctcttctcaggggccttcacggccacagacagcgaggccatggcagtaacagtctcggcttcctcattctcacacttctgggcctcgaccagggagtagccggcggtggaggcgagcctctgcagcgagcgccagtactggcctgcggaaggggcgggtggctgctcagaccagggaccccagccctgtgcttgggcccacggggctccggcagcacccatcgctggcgacttaaaagcatcgcactctccagagacagaagccacgaggcggcctggttagaaactcacagagggtggcagtctggaaaagcttcctcgtgaccaggagaactgggcccttcaggggcaggacacctgggtgggggtgggctccccggagggtcccttcctcagggtggggcggctgggacgagcactccctgactccctgctggagtcccgagatgatgggggtgggtgcaggcagcctcctggtgtctcctgggcctcagggctcctcattcaggaggccaggagctcagtgcacagcagggagaccctgggtcccgcccatgcacacggacacttgcgactgggccaccctgcagacccaggatgaaggcggggcagaagtccgtgtgcagcccctgggctcctgggcctggttgctcgcggggcagggctggtccttgggccaagggtgccctgaactgatggactggggtttgccggtccacgggcagaggccagacccgaggacacaggcttccatgcaggtcccagcctgtcagcgggaaacctggagaagggacctcacacaccccctggaccgcagctcttctgccccacaaagcagagctggtgacttggctgtggcaggttgtcgggacgttaagcggggtgagaggagagtcaccagctcatcgcattcaccctgaaagccaggtctcaacaggcgggcctgggaatgctgctggcagtgagagagaagcgggggttggggggtgggggggttgtggtaggtggggtgggagaagggttgtggagtcgggcccctcccctggggggggtctccttgctgagccctgggccaggccacttactgtggatttcaatgaccttctccatcgaccgcacggcgttggcattgggtctctgctgtaagaccttttctgggagaggatcgagctggggacgaaagaagaatacatggtgaattcgaggccgtcagtagactccctgtgagtgttcggatgggatgtccggatcacagactccctgtgagtgttcggatgggatgtccggatcagtgtcttcctcatgtgcacgtgctaacagagaagacagcttgagaaagccagaggtggttgtggcatgacataaatgttttcacagaagtagacttattttccttaaggtgtttccactaggaggctctcgggtacgtccgtgggtgcccgtgtgggcaggacactagctggtgcccagaggcagctggcgcagaggggcagcagcgtgggctccaccgctggaggcacggcacagcgtcaggggaagggatgatggatgactttctggaaacatccgtttcatcgcacttgtaaacaagggttttatagacagggcttgaatagccccactttgggcctccctggtggctcagcggtaaagaatccgcctgccaagcggcagacgtgggtttgatccctggatcaggaagatcccctgaaggaggaaatggcaacccagtccaatattcttgcctgggaaatcccatggacagaggggcctggggggctatggtccagggcgtcacaaagagtcagacacaactgagcgacaagcacatctgcccttcggagttttcttccaatgatcaggtagaaaaggtagacagaggtgtgagcatctctgctctgagctctccggaagtccctgcagcaggcggagtggggaggtgcacacggcccgcctgcctggcggccacaaggcgcgccgggtgtctgccacagagccgcccagcacgcggctaaaccggtcacaacgtgcttgctcctcacaagcgcactgtagccagcgtcctccgtgcttatctgctgtacaggcagcccctgctccggggcccggccgaattccgtcgcccctgactgacggctcgcggccctcactctgcttctttccttactttcactgacttggcatcgttgttcctgcctcctcgagttcctgttgatcggggctttcctgcactgacgcccttgccttgctcaacagacagctgcctgggctgtcgtccttctgcctgaagctcctacagagttttcttcagagaaggcctcatgggtcaagctttcccaggttttttctctcttcccacccaccccagccccgtggccacagtcccgctgggcctgcggctctgggctggtgggctcttcctctcgacatggcagaccttgccccgctgtcttctgcttccttcactgtgaagcggttggtgtccggctcacactgctcctcgtgggttgcctgtctgctctctctggctactttcacagtttcctgtttgccttcgtggtcctgcagtcgctcagatgagcttggatgcaagccttttttttaaactctctgggttgggcccccttgccttccagagctgagaatggtgcctccatcagtcatggaaggtcctgggccgctggcactttcagtcatccaccccgcattctggtggggacgctgaacagacacacaagcccccttctaccccttgtctctgggctgtgctcagcctcattccttcagttgttgcttccaggttgtgggattccctggtggctcagtggtgaagaatcctcctgccaaggcaggagatgggggtttgatttctgggtggggaaaatcccatggagaaggaaatgacaacccactccagtattcttgcttggagagtcccatggatagtgaagcctgacaggctacggtccacggggtggcacagagtcagacacaactgagcacacacaccccttccaggttatcagtcgtctctccagctgatctcaccgagtttctattttctgctaatatgttttcatttttagaagttccatttggctctctttaaactatcccatttcagtttcagcgatttctggttcatcattcattagtatcttacttttaatatgttaaacatgattactttatcgtttaaaactgaaatgaaaaattaagttctggtagggctggtgacgaaaatcagaggaggcacagataaacatgttaggataagaagcacgactacaggaacagtagagatgaaagacagtacaagaatgctggtaacttcaatcaataatttggaaaaactggccgagatagaaaaaattcctggtaaaatgtaatcttccaaaatttactcaagaagggataaaaaataaatgacaaaatcagtcacttaaaaatttcacccaaaggagacccacggcccaggaaagccctttcagtcaaggaacagattattctgaccctacattcacttttacagagaagagggtactcccagctgtccatcggtctgtctatccctccaaccatccatcatccatccatccatccatatccaaccactcatccatgcaaccaaccaccaatccatccatccacccatctatccatccattcaaccatctactatctatccatttatccatccgtgcacccatccaagcatccaccattcatccacttatccaactatcccaccactcatccattcaaccatccaccaatccacctatctatccatctacccatccacatacacatccatccatctaaccatccaccatctatccatttatccatccatacacccatccagccatccaccacccacccatccatccatcaatccatccatctgtccaaccatccaccaatccatctgtctatccatccacctacccatccaaccatctaccatccatccaaccatccacccatttatccatccacccacccacccacccatctatgcatccatccaccaaatcatccacccatctgtccatccatccatctaccaatccatctattcatccacccacccaaccatccatccaaccatccaccatccatctacccattcactagttcatctatccatccatccaccagtccatctgtctatccatccacccacccatccaatcacccaccatctatccatctatccttccctccatctgcccacccatccatccaccatccatccatccagccatccaaccacccaccatcatccacttatccatccatccacccacccatccatcaatctatccacctatccaccaaaccatccatccatccaccagttcatctatccatccacccacccatccaaccaattctccccccaaaattgattaaaaaaacatggtctaatagaaaaatgggcaaaaaactggaaaagaaaggttgagtggccaagagacctgtgaaaaggtactcagcctctgaggaacgaggaagtgacccccctgctgaactgggttgtgttgtcctgcagactgatagggtcaaatgtgaaatgccatgttgctgaggttggtcctccactactgagggcctgagggacaaacactcagatgccacctcgtagacgtgggaccaccccctccctccactgggatctgcctcagggatgcagctgccctctggccatggctgaccgcacagggtgggaccctgatgtaattcccaacctgggccaacccggtgagtcctgggccagagagcagatacagatggggagcccctccgggaacacctgcaggtccccttgaaaacggggtgtccccgtgaagacaggaatgtccttaagcaccttcgtcagtgggccaccaagggcagagcccaggtcccctgtgtgtatgaagctggagcagaaaacatgcctttcaggtttggggtcctcactgtggcataaacagctgtggccttattgctgcagtacaactctgatagtttgctaggattttatcccttttaagaaaaaagcagtctttagaaaataactcattccataaaatgcctatcacttgaaggcagagaggtgtgtcagagcatggtgccaggaattttctaaaacgcaaccccggtcctgctgctcccagtcctggggggacccccacgtctaacctccccagggggccctgggcgtggctgggggctgaccctccagggcgctacatggctctcctccagcaccctctgcccgggtcacgtccggtgagcaccctggcgcccacattgccatctgcgccgcccccccccatttccgtggcggctccccatctccagccgctctgggcgtcagtctgcccctagcatgtgtctagcctccactttacacacaaggactgggcagtggggggaggctctggctcttaaaatacataaatctctcattacttggggtcttatttttcatttaatagacatcactgagcagcccagggagaaccaaccactatccatcctgcaaacttcggaaacatcagggaacaagagagacagacctccgcccggcctcacagagcagggccccacgtccgcgggaccggcctgggtgaggggtgacgttcacgcaggagccagggcggtgggccgcagggaaagcaggggaggggggtcaggctgtgctgagctggggagggactgggggccagtgcaactgggagcagggagtcgggcttggcagagggatctgaggcatacggaggcgtacggtggccccaggaggagagcaaacgggggccaccagcctgctcttggcctggccgtgcgagctcggagagctgggctgtgtgccttcacttgcccgcctgtttctggaaggaaccaagctggagaggctttgaggacctccctggtggctcagacggtaaagcgtctgcccgcaatgcaggagactggggctcaatgcctgggtcaggaagatcccctggagaaggaaacggcaacccactccagtattcttgcctggagaatcccatggacggaggagcctggtgggctatggtccatggcgtcacaaagtgtcagacacgcctgagcgacttcactttcacttggaagagaacagagggccggctgtgggtgacaccgagtccgagtgatagatgggagcccctggccgcaccggggcacgttcaccttgcgtgtattccacgtcacaactgaatcagaaaggaggctcgtcctaagctcggcctttaacaagccagcctcggggaaagtgcgcaagaaaacccttgtgcagagcacctggttgtgggtgtgggtgtggctttctactctgcagtttacaagagctcacaccacactctgagcgagcagaaaccagagaggttacagcaccaaagacgacggtccttacggaatcttggccgaacccaggtcacagtgtgagttttccagaaaacagaactgcactttagtgggcacctctgggcctgccgggaacacgagagatgacggagcccaggcccccagcccatcctcaggggctcacgccccgtcccactgtccgggagccgccccgccatccgcccagcctgtgacggtcctgaccctcatggctgcgcccgggttcagatgcccggccaccccgacaggtgccccagcccctgcgctcttcccaaggagacagacgacgtcccccaggtctctctggcccaccctaccccctgcccaaaggctggctctgcgatcccctctccccatgggcagagggccctgtaggactcagagccatgggggcctgggggccgccccagcctgctctcctgcgtcttcccttctctcttggcctctccaggaccacttccagagatgggtttctggtcggcctcctctcccgagtcctccgccctcaggcccggccccagcctccctgctggctcccctggggaggggccgggggccacctgcggtcacctctgactgcggttcccacctgctggcagagctcctccaggggccttagggaagcatgctcccgccagggccggggctgagcccttctgggccatcccctcctcggggtccttgaggggctgggctgtgggtggggtcccctccccctcaggagggcctgcacatccgtctgtctgctcaggctctgtggcctcagcgtgtggactgcatctggcgacggggccggactcagcgattatccggggccggccacatggcgtttcctgagcctcctggtgatggcacagaggcttggagaacgtggctggttttcaacagtttttaaacactagcaaaaatgaaccacatggcaccaaaaaaccacaactcctttggacaaaggttaaaagactgaggctccattgataggactgcggaaggcatgcacccgggatggcgggacactcccggggcccccgaggtgggttccggtaaccccctcgggctcaggtccccattcccccagagcaggaggcccaggagctccggggcgggtcccctcttgcccgcagggggtgcagggccacttctccaggggagggttgggagctgatgggcccgctggaggcacagctcggacacgcggcccacctccccgacccaacgcaagccgtgtcccgaaacacgactaggggacagcctgctccatcctcacggcctgcgtgctgccactttggtgaggtgagcacaggtgaactccagctggcgggctggaagctgatagcgggcttggtcaaccctgtatctcctgcgtccacccgccgcttctaaccccccggggccgcctcactctgtgccctggcgaggcagcacagcgggaccagggagggtcactaccacggctgcgggccacttgatcccccaccacctcctgcgcggggtcttggacgggctcaatgagatggtgccatgggacccccagaagccacacagctaaacagaaaacggcccccaaaggagcctccccttgggggcgacctgtgacaggggaagtgactccccacctgcccggggccctgccctgggctgcagctgcttggcacgccacccacccagctcccgtaagtgacatctcactgtcaccatccccaagggctgcagatggcgtgaagctgaaactagccaatacgacggcttcatgtttaatagtcagttcacacagcttcagttcagtagtcagtatgatggctcttggggcggggcagccctccaggcccagccccgtgagcgcccctctgctgacccccacgggcaggcaacaccggccgcgcacagtcggcttccgcagccctggagcaagctgtccccgcgcccggcatcagcctcatcaaaggccgaggggtgaggctccctccaactttctggcattaaaaagatttttaagagacctcgataaaactagggcttcctgctttttgatgtgtttcaccaaaggaacactttgtccgaaaagcacaagcagctgagcggaaagccgagttctctgccgctgttttaaaatagctggctctcagaatcaaagccctcaagatggcttgaacatataaatcagctgccttctcctagtaaaaggggtggggagatcacgttatgggaagagaggagaggtggagagctctgcacactttggaaagcaaaagcaggtgggagtttgccagagaacattcacacgtgttgctaacaagctgatccgacaggggagactccagcaggcccctggacccaggtgtgacttaggttacaatggacaccatccaggacatgcagaggttgacaggagaaagcaaagccctccccggtgcctgcccacccaagcttaccacctccacccctgttgccagccagtggcctgtcccagcagacagccaggaagcacgcacccgggccaaggagcacgcacccaattcagggagcatgagcctgggccatggagcacgtgcccgggccagggagcatgtccctgaaccagggagcacaagcccaggtcgtggagcacaagcccaggtcgtggagcacaagcctgggccgtggagcacaagtccgggcccaagtctgggccaaggagcacaagcctgggccgtggagcacaagcctgggccgtggagcacaagtccgggcccaagtctgggccaaggagcacaagcctgggccgtggagcacaagcctgggccgtggagcacaagtctgggccacggagcaccgcaggcaggccctacagggagcctccctgcgattctgcctctttccctccctgccaggagtctcagatcccccctgtgagccccttggcccggccgttgggagctgccactgcaggaaggacacacctgtccagaggcagggctcaggcaccctcacggggaaccagataaccctgaccctactgagagagggtctgcacactctgcaaatgtggagaagccccattttgtctgacgggccctggggaggggagcagcctccaggcatctctgggtgggcctgcacctgcctaaggcccccacaagaccctctgtgtctggtgagtgtggaccctgggccagctggcgacctgggccacttggccgtgctgcccaaacaccagcggctctttccttggcccctcccggcaatgccgtgggaaaagcagccagagaaagctgtatggcaggcgtgggaaccacccacgcttccctgatggggtcaggaggctgggatgtggcctcgtatccaaggccgtggatgcatttaaagcttcgggaagagcacggttccaaaatctgaggtggaagctacagagtgggtttctgtcatgaacttcagattctcagaactgacccaggcagtatccccacccccatcctcccctgccagtggccaggtagttttgtccaccaggagtgccagtgggcgtgagcgtcctggcctgatggcattttagcctggaaagctccctcccagcgggtctccctccatggaaccctgcaaagttccctctgagccccgctgtcaggctgggctcctgaacccagtcctgggcatcgcccgagggtcagagcagcaggagagccacagcccacgctccagcccccgagatggcatggtgacccctccctcaggacctgcttcaggacgtcccagagaaccgaccacctgtgaggaggaaaccaggcaaaggcgtcccgtgcaagccctgcatcgaggcaggtgcctttaaaagacaaatgctgagctgtccgctcaggggacatggcttctaactgtctctttgcccacccacttctggccacaatcagacagtcctgccgggcgggcaagcctcctctcagatgcgagtggcagatgtgcaggctgcgggacagtggggcagggcgggccctcctacctcattccccagcagagcagagacgcaggcttccgaggcgtcgcagatggccgtgagatcgtggcccccctccagcgccaggacaacccggccgccggccaggcccattagctgcttcgtcaggtacccgaaacctgcgggggacacgggagaggcaagtggcgggtgaggccaggccgcggtgccggcgcctggcagcagaccaaagcggccaggggcgcaccacaccgccttaccgaggccccaaggctggcattccgagtgagacacctaatggaagtcaggttggcttgtgataaattcactggagggtttcggcttgggattcttttgatctccgtgggagtaggaattacgggttcggggctttgattttataatgctgcaaatcatctcgttcgggggcggggaggagccctgggggagcccccatctcgcctgtggaaccacagaagccaggaggcaggagggtggcgggcagcgcagctgccggggcctggccacgtccgtcccagagcccagggtgttcccgtcggccgagtgccgggcacaggtgtggcaacaagctcgcacgcgtgtcaccgccagggcccctgcgccctgtgtcactgccgtgtcaccgctgcacccccgccagggcccctgcgccctgtgtcactgccgtgtcaccgctgcacccctccagggccctcccgcgtccccacctggcttcctcagcagccacgggccctgcgctgcagcacaacaccctccccacggggaacggggatgcccctcctcggggagccaggccgcctgaccccatccgtccgcagaggctggcgctcggcagagcgggcccgaggctggactctgcccctgggcagctgtgggagccagtgaggccctgggggcccccagcctcggtctcgtctccgacggcaacagtgatgctggcttggaggggactgtgagggccccaggaagcactcaggcatggcccccacgctgggcgtggaggccgctggtgccctgtctgcccgggactcagcctctcggcccctggccgggcaggtgggctctgcgaggctgtgctctgtggctgggcttcttcttcactgcaccatgctctccccacatgggggcgggggacaggctcccctgacaagccttccctgtccccctggaaccccaggctcccagacactgcaacccccaggtcgctggtcagggtgggggcgtccaggcctctctgtggcgggcgctggggtggggtgggggctgctgtcacctgcgtgagctgctgagacagagaggacacacaaatctctcctcccctgactggagtgagcctgctctcgactctgtctgtcttcacagcgtttagggccagctcccccacaggccccatgggggatgacagcccccaggaggagggggacctggccccagcggacagcggcagcgggcaggccccaggcttgctggcctcctggctacatgcctgccgcaggccttgtgctctctggggagcgggtgtcgtggtttcagtaagatgtctttggggtttggggtggacactccttccacagccaccagaggggaagcctggtgtgcacaccgcacatctgatatccggccacccacaaacctgacttacatttggcggagaggttgtagcctccgaggggcgtggggtggccctccacagcgtcgaagcccgaggacaccagcaccacatccggggcgaactcactggcaatcggcatgaccacagtcctgcacggggcagagggggagacgccgcgtcagcccagggcggccaccgtcgctggctgccggggcttccggggcaccgcccagcactggggacccggggccgggtgcctgagctggggtgtcccagagcccctgcgctgggcttccacgaccccagcctgaggccatgccgtcagctgtgatggaccaaatgacctgctgccggggtgcaggagggacgtgtaaggttaattagaaagaaattcaacacttaggatccctaaagggaaaactgatactccagtttaagagaaccaactggttagaagtataaacagacactgaggaggtcaggggctaagttacatttgggaaacagggcaagaaaagttgggggaagctcctgttaacacaactgcctcaggagctcgcagcctgagtgtacggctcagcctggaaatctcgcttcctgctgagactgggaagactcccatccagtccagcacctgacctggagccagcctcatgggcctgaaaaccaccctgactttctgtcttcccctgcccggctcctcacctctgagacacacctcgcccccaccgggtcttcagaagattgcatgagggggctcagtgtgctaggcatgaccaatggtccccgcccctcacgggatgggccccagagggcaccatgggcacgggccgggccccagaaagcacatgggcacggggtgggccccaaggagcaccatggccacgggccgggccacagggagcaccgtggccacagggcaccccctagaatcccacaggctctcatcaggatgacatgaaatcaccatttatgacagcaaagtcagctctggaagatgacaactttggtcaaagaaacagaatccgttcagttcaattcagtcagttactcagtcgtgtccgactctttgagaccccatggactgcagcacgccaggcctccctgtccgtcaccaactcccggagtttacctaaacccacgtccataagaaacagaatgctcagcattaaatacttctccatctaggaactatcctgggtcgcagtcctgttgagaggtccctctgatttcaggtgggggcggccaagaaccctggagagccacacacaggtgaagacctggccctgctctgcaggacccttggtgaggagtcaggaggcccggccggactcccgcgaccacgcacggcccggggggcttcccaagggatgtccacctgcgacgggtcaggtgctgggagcgtctaccaccaagactcaccgacttcaccctggccctttgtccacccaggaaacccccttctggaatcagggagtcacaggctaggtgggcctttcagcagcttgcagcttctattctttcctctgaggctgtgcccagttcagtttactcctgaacagcctctgcagagctgacggaagtgctctcaaggactcaggctctgggcctcgggggccacccctcagagcccagcaacactgcgtgtggatcagaccaggggctgagagcattccctccgagggccagggagcagacacttccatctttgggccactcaacttaaaaaacacaagttgggacttggtccctgggctgccatccaccagccctgccccagccttctgccattccgactctgctaaagttgctccacctgtgacgccagccccagctccgaatgcttctcggcgccagtgggactagagctcacaggaactggagatgcaacgtagagagagcacagcctctttttctggctgcaccatgcggcatgtgggatcttagttccccgacgaggggtcagaccggtgtcccctgcactggaagcgcagagccttaactgctggacgccagggaagtctgtaagcccggtcttctaaacacaacacaggcatcagagcaggccctggggcttgtgtggaaattcctggtccaggctggtgggaggggggccacctcagaatccaggaagagctgtctgctctccctccacgcccggcagctgtctgtcctcacaaaggcacaggccacccttctccacgttgagcacccggcgggcccctctgcacgagccctcatcattccagcgaggctggttttcaattatttttaatgaagttcttgtcacataaactttgtctttgggcaggagaccggcttcagccgcaatcttggtagagattttaaagccggcacagtgtttcagtgaaaaccacagacgtttcaagcagacgctggctcattcagagagctccagcagacgttttgaagcaagtgcatgtgggcgctctgctgctctgctttgaagtatcgcggagagatttcatttctaatccccccacaaaattaaaaaaaaacagccctgtgaaaatcatcactaaaggaggtgagtaccgagagggtccctggtgtctgtgcttcgtgtgtggctttgctccaaagccaatcataacaagttgtaaagcacggctggtcccacgtgttggtgtgtgggtgagtggtgcgtgcgtgcgtgcgtgcagggtccggggaggggggttggcacaccggccaggcgggagtctgcgcacctgggagggtggatatgcgcgtgcacaccctccttccctcttcctggctgggacagttgacactgtaatcccgaatgcttgctccagtaagaaaatctgacatggcgctgttggcccggcgtgtgcggagtgggtgtgcagcacacatttttagtgtgccctaagccctgagaaatgtcgtctccccttgactcagcttccttgtgggtaggagagggctggatgcgtcactactgactgtctgccagcctgccttctggacctcccagcatcaccctgctggggaccctggtgccagaagcaagctgccagcccatgaccagttaacaggtgctgcaaagaaactggaaaactgcctgacattttatttctaggatgaagttttaatgagcaatttagtctgaaaataacaagatctaaatatccgttgaaggccttccctcaaaccttagagtccaagctctaaggtgagtgggtgggtctaggagtccttggcgacctttggggggacaaccaaggacagtgttgagggccaggagcctcccagggcagcagactaccaatagtccactttcagggaggagaccctgagagaggaggaggccaggtgcagctctggacgtgggaaagctggggggagatggcaacagggacgagcggcggaggtcctggggcctccgcaccccagggagtgggatgcaaacgtgcaaaccacccgcgtagctgagctcctggcccgtgacgcctgggacccagcccggcgcctccgccctggacacacgctctgcccctccatcctttacccctttacccctccatcctttgttcgctggtcagtccacacctgcagccaggtttccacggggaaaagccaggctgggcgccagggctcggcaggccggacaacagggtggatgttgctgacgggcttgtgcctgctcgggccagcctggtggctccacgaaggcggcagtgcccggggatgctacagggtccctacagctcccagaatcacgtcttatcagctgcactgtccctcgcacagccagactctgctgtgccaacatgccaatcccaacccacagtgaaatctaaatgcatgagctgattcaacagctagctccaacttctaaaaaagaaatgacttctcgatacaccactcaactggggcctgcacaaatccaccagactggtggtcaatgccagctaggggcagacgacctggtggccagtgggctgcggcgctgtgttcaggggctgtgcccactggttccagggccttggttggaaccacggttccggctgctacgctgcccctggctcccttctgaccctctgaatgccctggaagcactgtccacacaagctggcccccagagccttcgccccacaggcttccttgttcacgctcacgcccatgtttctgctggctccacagttcatgtctccagccaggagagcgctcactggctggagacgccaggcagaggatgctgacgctgagccctgaatccaggcctggttttataagaggttgctgctaggagcccatcagcacgatttcagtgacggtgttttgatcaccaaaaacttcctttcatttatgctctgcaaggggagcaatgtgccctttgggatctggaattctgtacacctgcccgggggggcctggcctctgagcccctgccctgggggtcccagcctctgagtccccctgctttgggggcctggcctctgagcccctgctttgggggcccacatcctcttgaaaccccgccccctccaccaggaccgcaggccaggggcccagcacctgctatcaagtacccgagctctgctgagagtcgggatgggaaggaagacagtgatgacgggaatgtggctgcctgggccgggccccccagcagtgatgccgtggccgcggccaggctgaaggccgcccctgctgccgtctccccgcacaggccctgccccgcccaccccccccaccccccaccggagctgcgtccctgaggcttggcctcttcgctctctgctcaccagcctccatctgccaaggtgtggacgtccctcctccccacccctagcaggctcctgggcagcaggcgggcacctcgcccccttctcggccctgcgctctgggccctgcccgtcagcccccaggaagccttgtgcttgaaggctccatgaccggccgtgggtgcgtcccccgccccgacaccaagaggcctccacccaagggcaggacgccacatgccatcggcacaggcccgcctcacccggggccctgccacccacgaggacaggtacaggtgcaacccccacctgtacacgggtgcagcgaccgtgggctacacgctgcatcgctcaactccgaggttttacttctgtcttctgcttctaagaccattgcagtagaaatgtcctgggataaacgctctgctgaggagacctggatgcccctgaagagctacagtggggtccaggtgggtgtgttctcagcccccagggcctgggccctcagggacagtctccccggagcagacacgctactgtgaatgcagccagcgccccggactggaggttcacacgtgtttcagaaggtcaagttttatgtacagtttagctcaacaacaaccaaccagtgtttttaaaaaagaaaaacatgggagaaacaaaagcacctcaaccttcctgcagggcttcaaaggttgggtaaatgaaatgaacctgcccagctgctcagaagagaggccaacctcactcagagagagatgaaggcttgcacttgcaaacaggcagtttcaccagcatctctgataacttataacatggcctttccctcgacacggcgatctgagagcagtcccagttccaccatccctgagcacctttataacatggcctttaaacccacaccaggctctgggagcgtgagcagtcccggctccaccatctccgtgatggtccggctccaccatccctgagcacctttagatcacggcctgtaccccatactgggctctgaaagcaggagcagtcctggctccaccatctccgggatggtctggctccaccatccctgagcacctttgtaacaaggcctttcccctcacacagcgctctgagggcagcagcagtcctggcccctgcaccccacactgccaggcagcagggaagtgaggggttaagaaaagcacaccagcatctcctggcctggaggcctctgctgctcagcagacttcaaagctgctggcctggctggtttgaattaaggtccccttttctcccagagtctcaggcccaggagaaagtgccgctgcctctggctttcattaggggcaattttcttatctcttcttcatctcgggcttgatctcctgaaatgcaacgaggcaggcgtgggtctcagcagaaggtgccgcctggaaggcatggggcgagcgtcgtccgggcccccggggagcgggcagaggaggggaaacggcttctgaccctccttccccactccgatcgatgcccagggaaccataaattgttaacttcaaagtgctattttacattaaaatcaataaaagaaaaaaaaccctgaaacaattttccttttcaaagaggccatttgagctttaaaaagttcacttgatagggcatcaccatgtacacacttggcagaagattaaaacgggacatcaacagcaactaggggtgaggggtccgttgtaacgctggcgggcggggagggggcgacccccaggacccgcctcctgcccgctttcccaccccatcagcgtgcccagcaccccgagacagccctggaggccggttcagtcggaacctggtccgaaggaagagggaaccgccatttttatcactttaaacccgactgagcaacttccctttcacttttcactttcatgcattggagaaggaaatggcaaccgactccagtgttcttgcctggagaatcccagggacgagggagcctggtgggctgctgtctatggggtcacacagagtcggacacgactgaagtgacttagcagcagcagtagcaacccgtagtttaaagacagcctccaccagaattcagccatgctgggtcccctgaggcatcagaggtcactgggctgtattcatgcctctcagagccgagtccagacacttttcttccccaggaagcccctgaggagggcctgttctcggggtggggcgtgacaaaatgtaggtggctggagggcatcccggggcgggtggtgatggcctccacagtgaaggccagttttgatttcctgaagctgatatttaattgtgtacgtgagcagttttcagatgtggtgtctgtttggggggagtccttctcccctaagtaagggggaggacaatatcacgattgcattacatcttaccaagaggaagaggaaacgacagcattaagccactgagatcggaggagagagtccgggtggcgacctcgtgggccttctgaggaggcgatggggtcctgtctgaaccggccgctctcactgtctgtacagctcatcacttgagctgctgtttgacggaaaccgagtggcaggagacggggcctcatgccggcggagccacccttggggcctggcctttgcatcaccagacccagacaaccgcccctgaggccagggcacagacgctgcgagaggccgtgtgaaccctaaggccaccccacccagagcccagcccagggcaggcggcagggagggcccccggtcaagctctgacggcctggccttcactaggatcccagctgcaggcgcgacacagctgtgctcacatccacgtgtgcctccacgtacatgctcatgtgcataggcacgcacgtgcacacacacacacacaggtgggtcacacccacacacatagatacgggcacatcacacacccacagatacaggcacatctcacacacatacacagaggtacaggcacatcacacacacacacacacacacacacagacacagatacaggcacatcacacacacacagatacagacacatcacacacacacacacagatacaggcacatcacacacacacacacacagatacaggcacatcacacacacacagatacaggcacatctcacacacacacagagagacacagatacaggtacatctcacacacacacacacagatacaggaacatcacacacaaaaacacacacagagatacaggcacatctcacacacagacacagataaaggcacatcacacacacacacacacagatacaggcacatcacacacacacacacacacacagatatgggcacatcacacacacacatagataaaggcacatctcacacacacagacacagatgcaggcacatcacacacacacacagatacaggcacatctcgcacacacacacagagacacagatacaggcacatctcgcacacacacacacacacacagacatagatacaggcacatcacacacacaaacacacagatacagacacatcacacacacacacacacagatacaggcacatctcacacacacacacacagatacgggcacatcacacacccccacacacacagatacaggcccatctcacacacatacacagagatacaggcacatcacacacccacacacacacacaaacacagatacaggcacatcacacacacaaacacacacagagatacaggcacatctcacacacatacacagatacaggcacatcacacacccacacacagatacaggcacatcacacacacaaacacacacagatacaggcacatcacacacacacacagagatacaggcacatctcacacacacacacacagatacaggcacatcacacacagagacacacagatacaggcacatcacacatacacacacagatacaggcacctctcacacacacacagatacacgcatatcacatacacacacacacagatacacgcacatcacacacacacacagatacaggcacatctcacacacacacagatacacgcatatcacatacacacacacagatacacgcacatcacacacacacacagatacaggcacatctcacacacacacacagatacacgcatatcacatacacacacacagatacacgcacatcacacacacagatacaggcacatcacacacacacacacagatacaggcacatctcacacacacacagatacacgcatatcacatacacacacacgtgcccgcatgcaggaaccagagcacgcactcaagaggaagggaggagagtcacttggaaagttgatgggctccaaagcctggtgcagaggctgtgtctcaaacaaagatggaaggtctgttgggctttgctactgatcagaactctcctccttcccaggggccctggacgtgcacttgccaggggctgccccccatcccctgtcccccgccccccagtcattgctctgactgcaacaggaggaggaaaccagtgctaccagccctaggaatcccttcaatgtggcccagatcgaagcagaaatcacggctcaatgacaaaagcaaagacggttttacgagtcgccttgtacccgacttgcccagcccagcctaacacaacagaaccgaagtgactaggggaggccctcccgatttttaagtcagcagaggagggatgttcacttctgtttcccatcatctcacagaaggttttttgagagaattaggatatcaggagccttttcagaccgcagcacccgattctcattaacctcatgctttctgacaccttcccccagcctccctcactttcttactatcaagaccccagatagagtcctggtttccacatgacgcacaagacaggaaccctgcagacggaaggtgagaaacagtcttggggatgccacctctggcctgaagagcagactgtgagaagcctcggggttcgtcccccaaaacgcagagacagcaagaccagtccccgcggtgccagcacacagcggtgcccggggacggagcgggggtgctcacaagggaaggtgaaggtcagaggagaacggtgaagcccgcaggagctgggcccccacgaggggttcccaactggtccctaagtgccccacggggcagaagccaggaccctcacctgaaggctgccaggtactctgcatctcccatgggggggtccaggccgccggtgaaagccatgttgacgttgaagcccacgccagcgcccgtgcccacctgcacagaggagacatgcatgccatgacccgacctgggcagccctcatggtgtgcccctcgcccacccacccgcccccaacacgctgcctttcaggatggggagttttcagaggcagaaaccctattcccctgcacgtgcagagtgtgggggctgcgtgccctgcctgagggaggggccacaccatgaagggccgcgaggaccgctgcgagctggcagtctgccccgacgtcccttctaggacgagaccccgaggtgggcgggccggtctccttggacgggattccccactgtcgggcttctccactcagagcagggaccttcgctggagtctcgggggtcactcgggagctcaccatgggcactcgactggcgagagggccgctgccctggacacacgtggtgactgtgcagcagcctctcccaagggcgagggtgcctgtgctcaccggcccaagccctcggcccgctcaggctagaaccagcgttcccaggatgtcgtctgcacacggaccagtcgtggcccgtgggggcacacgtgagggatgtgggctgacggccgcccccagtcacgccgggccccctctgctcacgggctcacctcgtcgggtgcgccgctgcctgggaagaagttgccgtcgtcgtagcggtgcagggagatgtagagcacgcgggggtcgccgtagaaggcctgctgggtcccattcccgtggtgcacatcctgtggggcggggggtgctcagcgccagcggcctcccgtgaggccagcgcctcccgccagcggggacgagccccccggctcggggccctcagggcacagcctgtggcaggtctgcagggtgtctcgctgccccgggggctgccgtttccaggcagggtcatttgatccgtgtcttgccccaaccccgggggtcaggggctggtggtggggggagcttgccagcactggcactgctggagtaaacgcccttcctgccagcctgtggctcccacggctgctcacttgggagggcgggctcagggccagctccgccaggggctgagagctgggggcagacccagaacaccaggggtgctagaccctgagtggggtgacaagccacatgagtgggggtggctggtggccggtgcgtgagctgtgggctacagaccagccgcggttttcagcccaggaactgctgagaatctgcacacgaatgctatctgagctcactggagaaaatgcaggaggacagctgggagcgggggaccagctgggttccaccgaggcctgagggtgagggtgggggaggtgccacccgccgccatctgcggccacagcagagcctcctgcacagccctggatggcagccggcgagtgtccgccttctccaggggcttcatgcccccagcatctctgactgctccccatggggggctgacgaggggctccctgggctgaacagagcaggcactgggcgtgtgaagaccagggtcggcagccgatgccctgcagccccggcaccaaggacctctcaccagcgcctgctgcccggagcttggggtgtccctggctgtgttctggttttacttttcccaaacccaggaggaactctgcagcataaaggataatcccgcctgaggtacctgatttttttttaactaaaaaaattatgaaatggatcataaaatccaaagggaattttctcccctccccttgccatctatggcttgaaaaacaataataaagtgaacaccttgagtacccacctcctacttctggaattcagttattctacagcgtttttcatagactgtaccctttcaggcagggcactgtcagaagtggcccatcatgtgggaaaatgggacagggggttaaattggtaaaaactgggtcacccggcagaagcaggagtgacagggaggcaggcccccgtcagtgccaagggcccacgagccccacctgccccccaccctcctacaaggtttggcaagaccaccctctagctgctgccctcaaccaccagcctgtctccagacacttcagaaccatggtcactgataggacgggctggtaggagctggcacactcctcaggtttggggttttactttctgcatctttgagggagtttccataaagtgcaggtccgcaaatccagtcgtcagcggaggtgggaaagcctgcctctcctctgtctgctggaggcggggtggggtagggacgagctggcagtgccccacaccccctcaactcacccagtccaccacgagggtcttgctcacgctcagcctttgctggagaagcttggcagcgatggccacggagttgaagtagcagaaccccctgcaggggagaatcaggagaaacggagaaaaaacgtgggctctgattagtttgtacacagcttgcacaagaacattcgagaatcccgagggtctaagaagtctggtgaaccacggcttctgatgacgcgatctggacaccttaactgacgctgatcatggaggcgcgcgcgcacatacacacacacacacacacggaccctgcgcacagcctgtccatgctctcagggtggcagagtccatttcacttcgtgtcccgggacacctgctgagacctgcactgaccagcctcccaagaggcacacaggcccacggaacacagaagttactattctacttgctccccgcttatctttccgtgttctgggatgtatacaatgattctagagaggcttcgagaggatgggaaaaacaagccaagaaagtgagtcgagtaaaaatgaaaatctcctaaacctgaactgccacagaagctgaggagcctgggtgggcttgttttgggggtgtaggctgtctgtctggaaggggtaccaagcactcgtagcctctcctgccttgctggcctctgggacccccaagagagccttcagggacaagactcctccaggctccatccaggtccccctgagcccactctctaaaacatgtaacaagccagactcagattagaaaggtgacctcagagcagatactcagtcggtcagcacccgcttctgggtcacgtggactgtcctggaccagggagggatgcacgcgggtgacgacagctcctccacagcaagggcccttcctgcagccaggtcccgacgcccccactgggctcaaggtggctccctgcctgcgtgcttcctgcttctccccgcggctctgtctgcatgtgtgtgcctcaccagctgacaggccggcgctcagccttccaggctccgcctgtcgcctcgtcctgatgaccccaaccctgagtcttctgtctcaggccccggtagaagccccatatggcactcactgagggtttcctgtgtccactttgggcacaacttgtggggtcaagtcctgtgactcctgcagggggcttctcctggacaggggtggatcctgagtccacatgccaccccccgccacctcagccagctccacaacccaaaacacaggctggacagctgaccactgtggttgtggcctggtgacctgagcctcatgataccagagcatgagcaggtcggctggaaggccacatgtgagcaggctcaagaacaaggacgtgccccctgaactcctcctggggcagctgacgttccctttcctgggctagacaaggaggtggcacctctggactcacttctgcaccctcagcctcccctctgtgccccctgccacccgaccccgcatctttccagagtcatggccaactccagctgcacatcctgctggcccggcacatgggaggggtgtgagacagtcgtgtcccctgcccgtgagcgaccacgtgtccacttacatgggcgtgctctcctctgcgtggtgtcctggagggcggaccacagcaaagccgttctaggcacgacaccagcggggagagacggacagaagattggtttcaggtcagtgagaaaaagatcacaggctgcccttgagcacaggcacagtctgcatggtttccagccgcccctgggcgcagacgtgggcaggacccagggctccctgtgagtggttcggagacacccaggtcccttctgtgagaggcctgttgtcatcacagatcactgagacaaaaggtcagctcactcctgactttccatccataacagtcttctggccaggctgtgggctgctgagcgggggagtctgggaaggaggggaaggggcgcctgtggccctgttctgattataaccatcaggaagtaactggatgggaatgctggagcaaatgaatctgatggggcttggctgcaccttggttgggttgtaatgtcagctttcctgctgtctctgtggctcagctccctgcggaatgggcagtgcaaaaaaaggaccactatcgcctgtgagcaaagtcgacaggctggagaagagctgcaggctgccccctccaggccccgaaatcatttaggctttaaaaggaccatctgcaaaccatcctgcagccactgtaataaagacggtttagaccagcacgcccagtctcgccagcccaggaagctgtgtggtcaaggtctgcaacggaggccccagggccacggaccacgctggccaggcatgggaagtgtgcccagcctgctgcagagactgggctgggggtgcacttggtgggagaccccctcagcaccgcccaaccttctccctgtccctggacaggacctcacaccccgggcctctccagtaaccccacggctctgtgcccgccccagtgtagctgagagccgaccagcagcaggtgcggtggtggggggagcacacaggttcccagtggaacggcagctctgtgccagcgccccaaggaagcagtgagacttatcaacgtcgttaaacctggacgtctctttaacgcctgtgcagagagacggggtgtgtaaccagcccagcggggctgtcatcttggggagaaagagactgtggtcagcgtgggatctgagcttcctggtgaaaatgagagctttggaaaaccagctcttgcctgtgtggaggagaccctcctgacgagacgggaggtgacaggcacggttcccagggtgtgggctgtgaacactgcctagtaagaggcgactgaagggtctggggccctccgtgacccctcatctccagacaaccgagcaccgtgcaaagtcaggataaacgacgcacttggcgtgcggggcccctcataaagcaggaggacagaggccgctggtgtgtttcagggtctgcactgcaacacgtcttcaggacagcgcccctcgctgaactggggtgtagggtcagagacgcagacctgtagtcccctgaggagcccctcccctcgccctgcactaggccaggctgcactgccatcgtgtgcttcaaccaaggctgcgtgtcgccagccacggatgcagaagcgggtgtgacgatcccggctgagccacaaaagccagatgcaccattatttttaaattaacaaatatttacaaagcttcctttttcaatctctgatgactagtcagatgtggatgacacaactcctacagacaaaagctctcctggtctttcagccactgtgagagggtggggctctaagagcgacctcgctgagaactgctgtgtttgtgtgtattctcacaagggcagggtcccctgcgggtcaacagcggggacagacctgggcaccccgcccccctcgcagccgcccggtgccctgcagaagcggggagcagaggcggccggctgccccctccccgggcaccctccccccaaccccaagtccctgctgcgggtcctcactgaccttcagctcccccgtggccaccttgaagaccagctccaccacacagcccacggccaggcgggcagcccccgacgagtgcacctcgttccatatggtatcactgtccacctgtggagagagtgggcctgcggtgagcccagtgccccgagggccacaccgcccccgccctgccggggccctgtgctctgcctctgaaactggagggtctcgtctctccctgactaattacagaacacggctcacattccagcttactttttttttttttttgaagacacgccaaaaaatactgaacaggaaaagaacagtaaatgcacccaaaatagcgcacctgcgttctcactgctttctgaggtgtcatttcttttctcagtggctccaagttactccaagctaagagtcgtgatgtcaaggttacctagctcccccaacctctttttttaaactgcaactgcagctgagttacactcacagtcagcaaaagcaaatgttaagaagggttagaattagctgtttgctgttcagtcgtgttcgactcttatggactgcagcacgccaggctcctctgtccatgggatttcccagggaagaagagcacgttgccatttccttctccagggaatcttcccaacccggggatcgaacctgtatctcctgctttgctggtggttcaaatggtaaagaaattcgtctgcaatgtgggaggctgggctttgatccctgggctgggaagatccccaacccggtctctgggaaggccggctctcatgtcgattttattgaactgattcttgagctgaaataactggtccccaatattctagttgagagactactgcaatgaataacagcacaccattatttagaacagaagcctgtctttgaacgttgaatattaatgccgcggagaccggactaagtgcagagcgttcttctgacatttggaagctatttaaagaacatagcggtttggtcattgaaaagaagaacccgcacggaataacgctcctcaggaaatagttcgaaccgctcgtaaatgtattttaaatcatcttgctttgaagatgaagcctcaagacttcactgaaagaaacccatccacctcacgtaatgatcagggcctgggcgccgaccctagtgggggcggggtgccagaccctcacctgcagctcagcccctgtgtctgggccctgagcgttcagggcttggaaggggttgccgtgggcagcaggttctcacgggccctgcagactccgctccaggtggacaggcctgtcactcaggcttcccagagccctctctaggaagggcatgggagtcccaggcgtgtgttccagtccgtaagagtaccatcctcgatactcaggggtggtttgggcaaaaaaaccactcagattctttctcctccaaatgcagtaacttgggcttttggctaagtaaccagagccagagggggaaatggaccgaccctccgcgttcagtgaagggtctttgtgctctgctcttgtctcaagggtccagaagctcccatacataacattgtgtccagggtaagggacagacccccagccccactgcaagaccccaggctgccactgccgcccgagaaactgaaggtgatctgcactgcctcggggcctccagctgctggccagcagctccccgtggacccagtgggatggagggcttggagccctgagttccagaagaacgaggctccagggagggcgctgggagggcgacaccgcagaggcggccccactcagggtgaccgccacacgcgggagtgatggaggcgggggaaacagggcccaccgcccaattccttcacagttccccacagtgaaggtggacgggaggacagctggggagacctcacacggaggtttcaaacggacacttggggtggcccttctgggtgggctgcaggcccccagggcctgtcaggggctgccccctttagccagcgaagggctggaagggaaatgcaaaaatcgggaggagagcaaagcagaagttgctgttaacttggttttgggggaaaaaaatgtaaaaccagaaaagcctgcattacacaacctggatgttcacttgcgcgacctttccttccttgtctccacagctgacccaccccctcccagccacacctgggtccctggggtctccgcggccaccccgacaccccgggggctggccctgcagtctggaaggagacactgaggcccaggagggctgtggctgcaccagcggcgcgccgaggccccactgagcctggcaggaggacgcgcaccgtgaccctctgcccatctatttgtgtcatcgctcagtcgtgtctgactctgtgcgaccccaaggactgtagcccgccaggctcctctgtccatggcattccccaggcaagaatcctggagtgggttgccatgccctcctccaggggatcttcccgacctaaagatagaagctgggtctcctgcattgcaggcggattctttaccatctgagccactagggaagccctcttgttaggagtaattatagcaaacagttgggagtgaacagtccctttggacactgcatggctcacacccccccggttattctgactgacggactcccctcttgacctggctcctcttgctaagactctacaggtcgccatgctcctgagcgtttctgtgcccggatgtggaggtgggtgccacagccgccgtggtggggtgggacctggacttcacaccggagaggggtcgcctggctcaagcccccaggccccaggccccattttgctttcgtttgtggattataaatcctgccttgcgtggagcggctgcagggcactgcagatccaaaccttttcaagtctggccaaaaatttgccccgaattaagagattgcagcctatttacaatacaaaatacaataactctaggagggcctggtggtggtatgaataaatgccgtttattctctttctgacgggataattttcaaagcagcaatttttgtaaagactcaggaagaaaacaattttgtttcatttccataacagaatccagacctgggctccgctgtgcgatctgtcattacatggaccttcgaccgccgcgcggttccagccgggacgcctttgcgtccactgcggcctctggcctctctgggaccaggactggccgtggagctccacggccagcaggctggctgggagggggctgctctgacccccgaacccagcacactcgccttgcctgcacccttcctcatccaaaggccggcaggttggcgggcagacccccctggacgagggagaagttctggctttgctaggggtcagctgggcgcccagacggcttcagcgcccccaccatgggcagggagagcctggatgaaacacagagcctagttcccccaggtgtctgcccgcgcacctctgctcaagggctcaaccccaggggcacggctctgcccgcctctcacggcccctaaatcttgtgcccacagtcagagtggcatcgggggctgcgggctggagctcggctctgggattgggatcaacacgctcccatgcggcgatgggattcgagagctgagtcggacgagggggaccgtggctgggcaggtcggatgagacgggccgcacaccagatcccgtttcctgaagccagtcccgctgccagacggccttccccggaggatggtgccccagaaccaccatcaaaacgctcacaggctcacggggcctttgaagccgcacgtgtgcgcggtggggcgatccgccccgcggaccctgtttatggaaaacacctggcagcaattacctgctcttcggagagcggggcggcggtttctgtgaccaccgggaccctgagaacaaacaggacgttatttacacattaaagaaacacttaccccgacaccaccacagggcagcctgacgaacacggacgttagtgagcctgcggggagaagagagcccgggtcaggcggcagggtcgccaggcactagtagggacgcagtgtgtccaccgagggggcacgtgcggctgccagggcgacacctggctagcagagggtcctgggctgagcgggcccagccccggggaagagacctcgccttccccacggcaccagctgctcctcgaggggcgggcagccccgtgggggacctggcggggaaccatctgagtggcagtgtccagagctcctgccgcggacacgtgctctcagccctgagctcgggctgccaccctccccggcagtgagcaggaggcttggggttatcgctgccccccgccccgtcccgggggagccctttagatgtggaatgcgagtcacggcagggtcccctccctacgcaggagtgttccagattcactgggatgtgcccagctaagaaaccacacagctgtggggctggctgtccagggaggcctgcgcagggtccatgaggctcggactgtccccgcccaggggcaaggccagggaccgtcttcctcctaggtttgaaccgggtgcaggatgacgaccagcctagaaggcgccccttccccaaagggaggtgaggcctgggcccacctcatccgggctcctggccaggaccatgctggggaccctccctgcccctcgagatggtggacctgtcctgcctgtgcgcactgctctcctccaggtcagggcctcccccatcgcctgccactgcggctctggactgcagttcccaaactgccccttgtcagagccacacggcctccagcccccttccctgtgaggccgtgggcctggctgcgtctcctactgcacctgtgggcctcaaccagcagaccaggctccctccccagcttgctgctgtgagaaggcggtgaccaggcagctccctccagggtctgctgctgacatcagtctggccaagccgtgtcaccgccccgtactaatcacacaggtctttctgcacgtggcttagaaatgtgcagattcaactgaaagaggcagggagatcagggggcagtgttggggcaccattaccatcatcagaggttaccagtcaccaccaggttgggatactcagatagatgtcctgatgacatgtaaacaggtctcaagcagtgagacgctatctgcccgggcatcctcacggccacatgggcgcacgtcacaacacagtcacggccgagcaagcacacgtcacaatacagagctcggtagagaaagaggaaacagaacgggctatactgttattaatgtaaatggaacacacacaacacgtgtgtgtgtgacgatacccttggctcataagagaaacactaaacgcgccagctgcagagggcagggattggggtctgagatgatggaggaacacttcaacaaagacaccacagcagcagaggggcttccagggagaatgatactggatgtattgaggagggcacccaggggggcaggcctggctcggcgggcgggaagcgacagctcccggctcaccgccccgccccgtttactcttgcccagtgacccctgttctggcatctctctcatttctgatcacctgccctaaactttggagccagtttgaaaacctcatccaccctcctggtgggggacttgagtccacctgcaccccagcacggggaccagtcccccatcacccagactcctgtccctcaagtgtcacatgcctggcggatgggcaaaaggggtgggctgaccaagagggtggatgtggagtgtcagggtgagctgggaagacctgtgctggtcagaaaaggacatgagtgggcttggaggccatggagtgtgttcaggggtagtccgaccactctctggcctgaggtcctgcagaagtgggggttactgggactgcagccccagtgctgtcatggggcccatgggcagccccacctgtgctggagagcgttccagcagcggggctccatgtgggaaggagctgagctgcccctaggatctggggccaggctgcagaccttgcactcggccggctccaggcctccctccgtggccactgactttgtccccaagctgcaccgtcctcgtctttgggagctccttctcaccaagccccactcagccacaggccaggtcctctcctctgggccccctgctggtgccgtttcatttctagatgtttcggctcgtatccatgccacttcgaatgtgataggctggcttctgggctcctcagtgtcccctgtcctccccttcctaggagtggccagcttggaccaccctgccctcccctccccccagtgactctgggtgtggggcctggacactcccgacaccccctcccaagctcagaggacacagacgtgctttgggggccaagtggaggatgccgtccacactgaagagtctgtgtccagtctgcaccgcacagggcctcagccaagggagagggaacagcagggcgcccctccacggggaccagggccatgcccagctttgggccaagtgaacctgcacggctccttctggtttctcgtgtggtatcctgaaccatgtggtcgagcgttggaaaactcagcggggtagcattcatcctccagggctggcctctgtgattggtcccgcttcagagtgtgtgtccccaggttcacaagttgaactttgaccctagtgtgacgctgggaggtggggcctttggcagcggctttaagccatgaagacagagcccgcaggagtggggtcagtgctcttcataaaaagagagctccccacccctcccaccatgaggcagcattggccgtgaaccaggcagaggcccttacccaccatgctggcaccctgaacccacaagtccagtcctggggcaaggggcatgtctggacaacgtgcctgagcctggctggctggagacttcagactggaaagagccttcctcggagctggccaggccttgccctgcagctgtggcctgactttgtcctggctcccagcagccctggtcctcttcctgggaggcggcagcatgctcgcgtctggcccccatgctctgagactttccagggtgctcgctgcagggtcctcccgccctgggaccctcgagtggccccccagtgcttgccattcctctccacgtcctctggaagctcccaggcccgcgcactagggacgctccttggatttcttctcttccccggctgcctggtgttcagccccggtcaagttcctcgactctgtcccgtccagcccagaactcggtttccgagaccaggtttcacattactccccccagatgtttttatttttctcctgttctcttgtcttggctcgcgttctgtggacatgttgcctcccctccaacgattctaaggccagtcttggcttctgtggcaactcctagaagtctggtctccgagtggtgagcaccttcctaggtgcccgcaacccctgaccttctgctctggctgagggtgagggtgtgaagctcgtggaaggtccagggacacggcgggctcaggcaccgtcatcaccactgtcgaggatctcaaggcgctatgtgttggggtgccccactgtcagctccctctgggcagatggaccctgaaggaggtcccccatctctgccggggggtaaaggtcagcatgccaggagcccaggatggagggagggaggcccggcggcccggcggcctcacctcctctgggcctgagtctgtcccagcccaggggccccctgcctgtctgtctggggctacagggcagccaaggggacgtgatggagacctctcaggccctgtggcctggtcccctgagtcctgcctgcctgcacctcagggccagggtctctacagtccctgtcacttggctgacagcgggcagcggtgggggcgtctgtccctggggccagctctggacccacttcctggcacgtgtcgcccagctcggtgcctcaagccccttcccgtctcccaagtgtggtggattctgatgcctaaaagcccagtcactgcacacagtcccctgcccagacccgagcacacttccaattgtaccccgcctccagctatgtgctttccaagcagtcagcacctacaaggcgcccagcaggaaagatgtgtcccctgcgtgcacggggaggtggtggggccacactgcagggtccctggggaggggggtgacacccatgcagtgagggccaggcacaaggccaaccctctccacgtccaccctggaaatgagagcaaacagggcatggcccatctcccccaaccccagcaggacccgagagtctggttctgggaccctttctgcctgccttggctcaagggagatgaggggcgtctcgccccagggggctgagacaggtagagaaacccaggttggcgactgtcctggctcaagatgattaggaagtggtagtggtggtagcgggtggaaactgtccaggaagtgttctaatggggggctctgcccttgtgagcctgggcactccacctgtctgtcagccccacctgccttatggggaccctgaccacctccctagggggaaggagttctttccatcaggcccagatcccgttacttcatcttgggggctgcctttccagatgaagccctgggccccaggaaaggctcaggccactgccgtccccctgggggcctggacgagcgtccccaggtggactccaggcccagaaaggggtggccaggtggtggctgcaggccctgaccagcctcgcccgtcacaactcagctagtagagattctgcaaaaccagcggtgctcagcccgtttgctccccaacatgcccaatgcaaagcaagaagccaagcgcccacgtgaacgccaagggcgggttcctccttggaccctcacctgacagcctggcccgggcaccatggagaagggccgcctctgcccccactgcccacacacagcccggtgggcgacactccgccaccagccagggccccaagggcgggatggcggggcctcaggcacgggccgggctgggagcagccttgcggtaaaggtaaagaaggccttgaaatacctagaagtttcttactgtccagtttctgcctgttgagggggttcgtgccgtagagcagggcgtgcgtctccgagtgcactgtctgcagctcctccagtgtggccttacgtccacggatgcactgcgggacaaaaggggatgggaggccgccgcggtcagccacagcagcaaaccggcacccgagacgcagcggggcttcacgtgcgcatgagcacagtgtgacttggttgttgtgaaatcaaaagcagacaccaccccacacgatatttgaaaaatatttgggaaatattttagagggcgtatactttaattacaacttagacattttaggaaaaaaaaaagataattccagccttcaacgctttagccttcactgtcacgtcaatgatttggcatcaatttgttattttgctttccaactgtctggtcttaaaatagacggaaaccgcctcacacgtggggctgcgctcagctctcatgaggccagaccccagctctctgggtattgagagccttcctggaggggaaggcgtcccataaccagcctgacaccccgggctgtgtccgtttgcatgcttcttcactttggatattcctcagatctttggctattttcagatgttccccagaaattaccatgaacatcattcttgagttgagctacgtttacttaaccttttagaagcaggctagtttgtgaagcaagattctggtcgacaccttacactttccgagtcggagtaattcaggggaaccgaccggactccgggttgctggggcagggtttgggctctcggggccagacgcaccctgtgcagaagtgggccaggagctgcactcccatggaaacccccagggggccctggaaccattcctaacagtacgacaggctcccacagacgcctgcctgctgaccaggggccaaggacggggagcccaagatcagcaggctgtggccaagactttcgcggtctagcttccagcgtgaaggggtacaaggtggcaggaaagctgacccacccacaccatgaccttccacacagagtggctcaaagcggggagccaatccaaagagtgggggtgctggctgcaggcttgggggtctcaggaattcacggcacggcaggtcccctaacctcccctgcctcgggtcaagtcccacggccatggcctatggaccatgcctcgtatggcgagtgctcccgagtgtgcggagggcgggcctggcctccaagcataatgctgcgaggaagcactcctccaccccagatcagtcccccctcagcctgtgtctctcacctcgggtcccccttcagcctctgtctctcaccccaggtccccccgagcctgagtctctcaccctgggtcccccttcagcctctgtctcttcaccctggatccatcccctcagcctgcgtctctcaccccgggtccattctccagcctgtctgcaggcctgtctcctgggtgtggggactcctgtggctgtcagtgcccgccctcagcgttgctctcctcgcccccaccttccaggtcctgccttgaaactaccctggcggccgccggccacgcagctcagggccccacaggccgagtagcggccgggaggatggccgggcagggggtcctctgcaggaggcgtgtccaccggaccgatgctgccccccagtggcgcgtcctcattgtgtctggaagcaggtgtggcctctccagccctctgcctgggggccctatcgtctctccagagggactcccgggccggattctgggcccagacctccagccatctcctccagagatcgtgggtcgtcataaggtggcaaagatgtggggtcaccggagacgggctgagctcaactcctcaacaccccgccccgaggaggggcagatggggagcggggctctgaccataccctccagacggcgctgggctccgaaggatggacggaacagttccgctcagccacaggctcgggctttccggggtcaccctaccgagctcaaccccctgccgactccctatccctggctttgtggggttcatggtttgggggtgggcacacgggaggccaggcccgtcgtcctggagggctcccgggaggtggtgtcgcctgtctgctccacagatgacagtgccacggcgcccacagcctggagccccctgcttgtgcacagacgcccttctaccccgagcccccgccccagacccaaagtcccttacggtggccacactcctgcatcagaggggtggagggacctcacagagtccttcagcagacctgtcctccaggacccaatgttcaggggtgcagaggtggggactgaattctggcagactgaccagactgacccaccaccttcaccctgcaggcctgaggctctaaccacaccctgagaggagctttcccaaaaactcaaggaagagaacctccaatgaaaagccagcagaaacgaccgtcttcccccagatcagggccaccagatcccatcccgtggcagaggccctgggatggcctggctatgcctgggcgataagagggagcctggtgaaaggcaggcttcccagaggatgaccaggaaggggagtgggcgagagggggccggggaagggcccctcgggttcctccagagggcaggcctgcgtgtctgcctgcgcaagggcggcgtcccccaggtcatcacacgcggcctggctcgcgacgccctcagggctgccctcacctcacatttgcctcgcaggccggtctcctgcagccgcgaccagatgctctggatgcgcccggcgtgctccgggtggctgttggtgttcccgcaggtgcactggtgcttcagcatcagcgtgtcgtacacgaggcctgcagcggaggaggcaggggtggctgcgctcagaggagccctcggggtacccggcagctggtccccctgccaggggaactgagctcagggcacttgcccaacagccagggtccgcaacacccggggagccggcgagggaggcagacatggaaaggcagccctgtccccaggactcaggactctcatatcacaggaaccaggctgacccagacagtggggagattttggtcccaaactcaggtctgccagggaccaggtctatggagtagtttgcccctgtggactgagatccatccatccgaggttcttggggttcagaaggctcggtgtctgcctgtggaaatgtgcagagcctctggacaggagcacacgtgcgtgcacacacacacacagacacacacagggatgcaactgcatttgaaatcagcctagacagtggggcgggggagggtggggcgtggccttccaataacagagcagcaggacaggagcagactgacggaaacacagacgcacacgcctgtccacgtggactgcaggtgtgcgcgtgtgtggacagcaccaggacacgggccccacccgacggcatcacggagacacagccgcgtgctgctgctcacggagtgcgaggcgggaacttcaccgtgaagccacccgcgcccctttcgcagacggggaacagcagagagcgagcggggagtggccaggacgctgcggagatgcgtgtggacgcaggaagaggcccagagctgcccacagcagtgtgggccctgcagagtcctggcttcgtaaaatacaccgtgtctgtgtctacctgcctgtctggctacgcgcagacacaaccctgggcgtgtggcctgacgctgacagcggctcccccaggggtggggtcggggccacccgctgcctgctcggtttccactgtgtgtgctttctttcaaggaacatgcactgtttcctaagtttgtcaaataggaataatgaagagaaactgggaaacagcaacagagcggggctcgccggccaggacactcgtggtgacatcatgttggcccgcgggctccctcgtggggacccccgagcacccagggggcacacgcaacatgagagtgtctccactggggtcctggggttgtccgagctgtgcctcctaagcaggggcccagctcagccgatgccaaggactcactcttaaagagctacctgctgactactcgtgacatcttgccgctctctggttttcttactgcaaagcaggaatttaacttctggaaactgactatgaaactcttctccaaatatgatcagtctccttccaaaatctgacaaggagaacgtagccacgtctgcacgttacagcatgcagagaaacagtgttcagtgagatctgatggcgtgggatgaaatggaactgcatttagataacctgtcctgagtgtgtccttgggaagaaacacccgacgcattagcagaggacagggtgaggcactgtcctggggccctctgtcccaggcggggtgggggctggtggcaggggctgacccggagcccctgggccgggacagccagtccagcgcctcgactccggcagacactgcactcagccgcagacctctgccctgactcccaaggaatgcttgcaggcggagagagacttctgcatagttgggaggctgtgggtgggggtgcagcgagaccgcaggcagaagcagggccgtgggccgtccaggagcggaagtgtctgggcctgctgcgccctgcacccactccacctgcacgctccaggcgtcacccgggcctcatgggcagggccctgggcggagcctcggtccaaggacaggacagacgaaggagggcaaggtggtgaccccgccgaccctgggcgggaagctgcctggtgcgggcaggcccagagatgggcaattctctgaggccatgcttctctggggaagaggagacgggcttctcaggcaggacagaccctggtgacctctctctgtctggtgcccccagcctggggctgagccttgggcagaaggtcaggtgggtgtgaggctgggcaccacccgggagcctcgcccagtctgagcctcgccctctggccccgcaggccccgcgtggcacctccctcacccctgcagccgtggctcccccgagagggggccctcgctctcccccggcccccaacaccccggcccccaacaccccgccccacggtacctgtggtgaaccttggcttggctggaggctcctgcacggacatggggaaggtggcggatgcgggggaggactgcgcccgggataggggccggtgcccgccaaaggacacggggatgccagcggcctccatggacgcctggtagttcctcagctggtggatccgctgctgctccaggaggagggcttgctggaggcggaggaaaggggccgctgtgttgcttcccagagtctcccgtccccggctgtagggctacggggggccctctcccccagaccctccaccccactgcccccgggctcccagtgcagagcctcgtgccaggctgccggggagaagcctgccctctgggccaggagggcggccagtgaggcggcggcctaggcctctgctgatgagtctggacatccccatggggagaaagactcagtggaaaagcctgtccagagctgatggggggcccaggcagcctgggggccgtgaagggctccttgaggaggtgacatctgggaggcggggtggcagtacccaggcagagggtgctggtgggggggtggactctggggtgtgaaggcagggactcggggtgggtccggttttgcccagggaggcggatggaacctggggagaggtggtgggacgggggggggcgggggggggaccctgcccggccctgccaggagcacggctgcttctgtggggacccaagaggtctcctctccacacggccgaggagggaagggcaggacaccctacttcgggtgtcctacggtggggggggggtgaggagcaggccgctgcccctgccttgggcctccctccgcaggtgctccctcccacggcctctccaggcgtgactcctgaagcccctggagcaggtgcccgtctcaaggtggctgcagactgctgcgcgtgccaccgcatttccccaagacgagccctgctgcggttctcccaagaaccagaccgccagtgcctctgaccactgcctcaggctcagagcccagggataactcccctaagagaatgccgaccaccttatcattggcaagacagcagccctaaaaaactgcctcccagtttcacaccagcgcagtaagagcacgctcaactccagttgtaagaggaggccgctgcctctgtgagtgggcgaggccctgacctaagcccccggcgtgggaacgaggcccgccgcccggacggcccgcctggcgcgctcacaccgcaggagtccacacggcagcggggacggtggcttctgctgtcctgccctccttgctgtcattagaactggctccaggggcccttgaagagcaggggttttagcactaacactggctgagacatgagacaggctgccctctgaatgagaactagcaaaagtgaccgccagccacctgtggccccgcctttaaacgcggaaccggagagaaggctgacctgctacccaagaggggctcccgggaaaccgaggcgctgagctgagccttggtgtcacctccatcctggtcccggggtggtgggggaggcaccccctgggctgtcgggggaggaggagtatgcctgggcagccagcactgggcccacagggagggttgggtgagccagggccccacagcccaggtgctgagctccacaatgaaggacaccattagattttagagtccagccctcggacgccctggcccagcttctcaggaacaagaccgctccctgggggcactcaggcctaagacggggtttcgactggctagctggctgtccccgtgctttctcgtcccggccgttttattcttcactgtaagttaatgaatcatccattgggtgtattcgtcactcttaggagtctgctaactgtcagcgccagggaacctcactggctctgggtgtccagaccaggctgcttttctggatctgttaggctggtcactagtgtcttcttgggcccaaaggtcctggcttctgaccagatgctgcaaaccttcttgatcaatgattaagtcagcctccctcttccccttctatgctgaatctaccagcattcggatttgcgttaatctgcagcctttgggcctgaagaggaaccatccctagggagtctgtggcttgttcagctgagaagcaggtgcataaatacacacagtggacagagggccagtgtctctgggggtgatacctgcaaagcagggctcacgtcacatctgcctcccgtatcaggagggaaagctgggggccaggaccggcaggtgtggaggacgaagaccttggactggctctaggggccctgctcaccccctgctgcccgtccccccagctctgcgggcacctgtctgaagagcagctcctgctccgtgggcggccgctggccggggtccgcctcccgtgggggctctgtctcctcgtggtcactctcgatgggctcctgcttcacctgcaccccggccagcgcgtgggcctccttctgccccgggagccggcccgggaagggctcccccaggagctcctggtgctcccgcagctcctcctccgtctcctcggggtggctctcgggctgccgggcgggctcgctgggtttgggggtcatctgtaacacagggttaccgggtggagcacggtggggcgggggtgagggggctgctgggacaggaaggggtgggcacagagcccacgtctcggggtcagcggggctgacctgggctgcggcaggacacacacagagcccacgtctcggggtcagcggggctgacctgggctgcggcaggacacacacagagcccacgtctcgggatcagcggggctgaccgtccgaggatgctgtcatcctgggctgaggcaggacaggacacagacacacagacacacagacacacactgagcccacgtctcaggaacaatggggctgaccatccgaggacgctgtcatcctgggctgaggtaggggacatgcagacacacacacaaagacacacacacgcatgcatgcacgcacgcatgcacacacgtgtgccgggcgctgtccatggtgtgtgcacacgtgtacacacacacacagacacgccaggagctgtttgtggcgctgagataaaacacagtcacacacacacacagacacacacagacagacaaagacacagacacacagagacacacacatagacacacatagacacacagacacacacagacacacatacagacacacacagacacacacagagacacagacacacacacagacacacacagagatacatacagacacacacagacacacacagacacagagacacagacacacagacacacacacatacagacacagacacacacagacacacacacagacacacacacacacacagacacaaacacacacacacacacagacaaagacacagacacacacagacacacatacagacacacacagagacacagacacacacagagatacagacacacacagacacacacagacacacagacacagacacacacacacacacagacacagacgcacacagacacacagactcagactcagacacacagacacagacacacccacaccccgggtgctgtccgtggtgctgagataaaacacagcctagtgtggtacctgctatcacatgcctgtttgccaggcacagtgaatcgcaatgcagtcactcaccacaatcgcaaggtgtcgacccatgtccatacctgggtgtgaagtggggctggggggggtgcaccctccttccttctcagtcaccccacccaccaccccagcagctcacacccaggcaccacagggacaggcggcctctgagtgtgctcacctgcgccgctggccctgagcccgcagctggcacaccacgccccgtccctgctgaacttccacgcacaagagccccgccctgccagggaggacggacccttcctcatgtcctgtttctagaaggaaaccaagggcttccaagaagcctcaagttttagtcctgagcacttgtgtcttaaaaagtcctcctggaagcacctgctccctgacccacacctggacgagtgcagcctggcccatgaaggggggcctggggatgcctgtgctagggctgggctgcaggcatggtgagcagccgggccagctgcaccgcgggccccagggccaggccccaggggaggacggacccactggccccctccggggcagctgccactgggcgagggacttgttctagtgaccgtcccctaagctgctgtactaagctctgcaaaggaagcacgctgtgaaaggcaagcccggtccctctctacatccgccccaaggcagcatatcctcaggaagatccaatccagctggaacatggaggatacagctccgggagcaggtccgtgctcagtggaaggtgaggggtgtgagtggggacaaagccgcggggtgggcagggggcagacaggctccaaaccatttcgagtaaacagtcctccaaccttccatctggtgatttgactgacttttcagtcgttcatccaaaaaagtgttctgaaaatctgtctttgaagatttggggatctgtccatctcatctgcttcctgcatacctggagctggtgaggccccgctatgagctttgtgcctggacagagtccactgggggtgagagcaccgcccccccccccgcccccgatcgggctgggggcagcaggacccatctccaccagcagagggcgctgggcctctccctggccccccaggtccacaggggtctggaaacctcagcaggtggccaggagcctcagctttacggtccgcggggccaaagcgctcgcgtttctgtcatccctcagcgtctgatgcagagcccaataggtaacaggctggggttgacgggaggtttggggagcccagggcctgggaaggtggctgggggacagactggtgagtagatgtcacagcagaatgacggggagggaacaaggatgggggagagtgggcgcgggcaaggcccctgtgctgtgctccagggtgaggctgtgagggaagaggctgtgggcgctgcgtgggggtcagcgaagaggacacggggacagggcgtggacagcggggggaacatggggatgcgagcccccagcagcacagacttaagcctccagacgacggtctgcaggcaggtgctgtctcagagcgggaggcaagctcctctctgctgtgggaagataagcagtcaggctgggaacaggtggggtcaggggactgcccgcagagaaatgaccctttgggggctcagtcgggagggggcggaagatcagcagaggggctggtccaggcgtgccgggggactgcggggattccaggccaggtgcctgaggacagctgcacggagggaggtcggggcgggaggggcacgggacccgggcctgccgcagagaggctgagacccacactctgggcgacctgcgaggggctgtcctgggaagggagatcggagcaaggggccgggctatgggccggggctggaaatgatggttaggaagaagcaggcagacgggaaacagaggcgaggcttttcccaggggacttggagaagctgtgtctgatcctggaggagccggggctgccccaggccctgccaggaggtcagctccgagtgggcacgcgtgaccttgggaatgaccgcggtgacccagcagcaaacagcacacgcagacccgctctgtctccccaaggccttctggacctcaggagcaccctctcaccaactaaacgagaacggaggtaactccatgtttggaacaacaagcttctaaaagccagactggagttcagggcccaaaccaaactggtgagcaggccagcgtttaagattactggacacactcaccattggatgcccaaacaatcgggccccagtgttcatgttcacaactgagttgaggagcagtagcccatgcgaggaatggctgagaccctggtgcactccagccagggctgtggggtggggctgcgggccttggctcaggagccttcaggccacgggcccggaagacagagggcagaaatgtcggtgctggcagtgctgggtacgactgtcagctccctgcaccctccgggagatcagtgcataaacacttcaatcagctgtcgctcgtgacagcaaatcaatcacggagggaaatccagagagatcagccgcgtctgtctgtctctctgttggagaacataccacacgtgaacaggtgttcccatctttccagtctcctaccctatcactcagagaacgacacaacacaattaagaagacagtcggcatcagaaaggtgacacagagtgcctctgacacttcggcctcatcttgcccaccttaaaggtgcctttcctgccctgcagggctgcattcagccacccaacccactcccgaccctgccctgtgccatctggtaggggagcctgccaggcagaggggctctggggcaggggtgctgagcctgtgtcccagcgcttgggcagcagggcctggtctgaggcagcttgctgtttgttcagggcccccagttctcccaggacgggagctgctgggcaatgtgatggctctgcctttaacctttggaggaaccgctggacagctttccagagtagttcctctcattctctatcagaaaagggctttgcttccaatgttagcatttggaaccagttatttgaaactgctgctcttgcttcaataaccagcaggaagggccacattgacctcggtgccgcttgctgctaaaagcaggttgggagtgaccgaccagatgttggatggagggacgcagacctctgggcaggagccctttggccgaggtagctgcaatgggcaggcagagcgccagtgtccaggggcctgtgcttcgggggccctgtgcctctgctgggcactctccgctgggcactctccgctggggactctctgctgggagtttgcttacgaggataaatccccttaagaaaccccagagacccgtgaggggcaaggagaataagccacccagggacacagacgcttcgggaacatagcccaccccactcctgcctccttcatgcaccaatgggacaagctgctcactgcccttgggtcccggccccgccccgacgtgttccaggccccgcccccacgactcctggccctgccccgcgcctcaccttgttgaggtgcagctgcggctgctggaagtgctgcttgtgcttctccaggaactgctggtgctgctgctggatgaccaggtgctgcagcgcctgcgcgctctggggcagcggcgccgactgcgtgcggcccagcgggcggtgctgccgcagcttgtgcacagagggcgccacgcgctcagcccctaccaggggctgcgcgtgcaggggcagcgcgcccaggcctgcaagatagcggtctggagagagcacggggaggggaggaacagaagggaggggcgaggcttggtgagtccgtgatggaggctggccgccacagcctccccgaagcccgccaggcctgctcctgcacgctgaccacccgaagcctggacttaggggcagcggccagtcatctggtccccccatacccaggtccaggtcgttagtgggcagccccagcacaggcgccctcagaggaaggggccagggtctggtggctccagaatgttctggaagaccagcgagtgggcaccttcctgacagcctcagaaacccaggtgtgaggaagacacttgcccttatgaaccaaaccattttaagggtctcaagacatcgattttatacacaaagagggcatcaacacttgaaaaaaattctgatgcatgttgtcaaaatttctgcaaatttctaggaaacgctgtcacctgctgcccaggagaagggcagcttggccgcaccgtgtctgggctgagtgtttaaattaagaatctgtgtggacagaagagggtaagtttgaatctgtgtttgaatcttgcttcaaaatgcaacctcctcatgtgaaccaggaggtggaatgttctcctatattcctttcaaccatcagtactttttcttttacaaattgtgggtttagacagtttaccattttccctggtaccacaggcaaaagggtgtaacagacccttcccagggcccctgagtatctgtcccccggcactagagctggagaaactaaaccacatcactcaggctgcctgtgaccccagatcagggcgtctgaccaggaaaatcacaggtggacaggccatgccagctctcagccacccagtgctgactcctggcggggggggctgtgttgccgtgtttagtcgaacccaagccccctccagggggtactgactgtcagtctttctctagtcccttcctggagattatttctgtattaaaatttttactttgtgtacaaatacaaaaaaaaaggttcaactctagcaaaatagtccttcactaccttttcaaaaagttaaccagtcatagttctctaaaccaccatcactttttatccaacccaaacagttttctggaaagataagttatcttaaaccttatgatctgcttggatagtaaactaaagtaaataactcgaaaggtagaaccaattctgtcctgggttttctattgatagaaaagttaaaaacaaacaaaaacacagcatcagcgtggagaaggtctttcatcagttgttggtctggtagctcagatagtaaagagtctgcccgcaatgcaggagatccaggttcaatccctgggttgggaagatcccctggagaaggaaatggcaacccactccagtattattgcctggagaatcccatggatggaggagcctggtgggctacataccatggggtggcaaagagtcagacacaactgagtgatttcactttcactttctttcacttggtctgggtattatgggggattagatcatttcaccagcttcccaggtggcgctagtggtaaagaaccctcctgccaatgcaggagacataagagatgtgggttcgatccctgggttgggaagaccccctggaggagggcatggcaacccactcctgtattcttgcctggagaatcccatggacagaggagcctggcaggctgcagtccatggggtggcacagactcgaacatgactgtgaaagtcactgagtctatacagtccatggaattctccagggcagaatacagcagtgggtagcctttcccttctccaggggaccttgccaatccagggatcaaacccaggtctctcacattgcaggtggattctttaccagctgagtgaccggggaagccctaagtgactcagcccgcaaattgtttcatggagggaaggatgtcagccactggacgctgcacttatgggattaaaagtccacttagtcactgaaagtcaccctctcagaagacatcacttgcttttaaagcttcctgagcccccgagaatgagggtgtcacaggtggcagggctgcagagccctgcgttggggccactgggctggccatgccagcagggaagcggctctcggttttagaggaggaaacacttaattccagagatccagtgtctgctgtgacccccgtcagggaaccaggaccccaagcgagctggaaaggcggggactctgggtgctccagggccccctccctgcgattggggcttcagccacttgatgctggcccagaagccggcttggccaggaagacaccaccctgaggacacaggcctgtccctgcagggtgtgggcagctggcggtggagaggccggacttacagtccccagtgccgggggagcccgtgtctacacggagccccggctgttcaggctggaccccggtctggttcccctccccccccacctcttacctccacccccttcaccccagattaggctgtagttcttccggcagaggggtgggtaaagctgtggggcccccacacttgaggaaagtgtcatgatcagcaccccttaaaactggacatctgaccttccaggagaaataccccatacctggtccaatgtggactcaggccacacttgagttcagaagtttctggttcagaactggaagatgacccctcagacctttcacaagagcttttgatggtaactggaaactggctggttttcggtatgtgctgtgaaacttccaagaaagagggcccagcacattagggtccaattctgtcctagtgaccagctggcctgtggaggctggctggatagcagggccctggcagcctgtggctgcccttgtccagccccagtgaagggacctgagggtggccggtgccaagcggctcctcccggggacagggcgggccagcctcctcagaggtcctctctggggcaggaggtaaagacgacaacgggacgggagctcctggtgagcacccagcccttccgtggacgcctgggctgaaggtttccttcacttgcactaacagtaagtgaatctgcagacaaaggtgctgtgcagacgcccccaccaggtatgggggttaaagaaaaagagaagttgaaaagccaaatcgccctctgttctgggcctggttcggccgcgccggccttggcacgggggatcctgttcagttcatgtggattctcacgtgaaatccacgtgagacaggtgactcctgtggcctgagcccttacacacccactgcccaacttaaagagtctttacagctggggtgtgtcgacctgcacaccccaccttgaccagctgctcagagttcaacctgggaactgtctggggcactgggctcttttcggtagaagactggcacgcgatcaccagctgtcaggagcctcctgcagcagcgaggaccgaggctgtgggagccactctgagcaggcgccgtgtggaactcacacccgcacggctgctccccgacagacccaggccggctgctcctcccgcacggtcagcctttgtggaatgatgtggccctagctctgacaccatctgtccacagtgaccaccagcaagcaggcacgtctgtgggccctgggaacctcagagaacctaccagaagccagtctgcagtgtgagcccgatcctccttcctgacatggctcagacaccgcctggcaccaggtgccaccgcagaggtatctgctgtgccctttctggcatcagacgctgagggggtgccgggcggggctgcgcaaggtaactcggtgtctgcgctccgggggatggaggtgcacagagaaactgccggtgctgagcgcccgggaggcccccgagctgggcctgacgtggaggaagggctctgaggccgggcatgcagaaggcgatgtgggcctcgtcagtgctgggtgagcctgcaccccgagcgcagcacgggtcgggggctgtgcgccaggtcggagctgtctgtgctggtggaatggtccccgttcctaccacgcctcagccagtggccacatgagaacgtggcaaatcgcatgtggcctggagaagccatagccggcccccgcttttaactgtcactgtccaggggagggatgggggcaggggtcgttggggaatttgggatggatgcatacacaccactgggtttaaaatggggaactaacagacctgttgagcagcacacggaactctgctccatgtggtgtggcggcctggatgggaggcaggtttgagggagcacggatatgtgtgtatgagtggctgggtccctccactgcccacctgaaacggtaaccgcactgttgttaacaatgaaagtgagattttcactatgaaagcgaaagcctcactgctcagtcgaatccgactctgcggtatggactgcagcccgccaggctcctctgtccatgggatttttctaagcaagaatactggagtgggttgccgttcccttctccaggggaatctccctgacccatggattaaatctgagtctcctgcattgcaggcagacgtttcagtgtctgagccaccagggaagtattgtttgttaattggctataccctaacacaaaataaaagtgaaaagagaaaaaaaaaagtgaaaaagccacaacttccagtgtcaatgtgaacagccacagctctgggcctggggagggcttcctggcatacctacaggagtgtgaggcgaccccagggaggcccgggaacagggagtgggccagggaagggcccacacgacgctgggaaggacagacaggccagctgggaagtaagggagagagcaagggtgaatgctgagaacgataaaaccaaacgtctccaccagagcaaccaacagctgaggggaactcccctgctgatactgaccctgggggctttgtcggccctcctaaaatctggggaggaagctaaagacccagctggatggtgcttggacctgggaggtcagctctgcagcagggccccctcatttcacagcgaaccctgagcactctgtcactcggaagtaacacctttacactgctgttgctacgcaaatcttatagcaaatctgtgtgtgtgtgtgtgagtcgctcaatcatgtctgactctttgtgaccccatgtactgtagcccgccaggctcctctatccatgggattctccaggcaagaattctggagtgggttgctgtgccctcctccaggggatcttcccgactcagggattgaacctgggtctcctgcattgcaggcagactctttaccatttgagccacggggaaagccctaatttttttttttctaaacataaccacccattagatggggcacattaaaaaaaaacaacattgctgctgataggaacccgctgcccagcagggccagctctgtgctccatcacaccctgagcacccaaagggcagacacgtcagggagctgcaacctgctctcgggaaatcaaccaggtgtgtctgacgctctggcttccacgctcctggctctgtgagtggactcggcctctccggccacagcctggcgtgggagggcttgggaacaggagttctgggggacaggtcacccgccctcccccagggagcccaggacggcccgatgtggcctgctcacctgtgacaaggggcgtctgtgcaggtggctgctccaggaggaccacgtgttgcaggagggagccaggggccgcgccggcgtcacgctccaggggcgccgtgcccaggtagggggcgaggtgggtgccggggaagagggagatgcgctgctgcagggcggggagggccagtctctcggcctcctgctggccggctgccccctggacagacaggcacagccgggcgcccgggtcaggggcctggggggcgctgccccgcatcaccacctcgcagaccccaggggcgcccacttaccgtggaggggccggtggcaggcagccccagggtgatgttgggcagggatggtgaggtgtaaaggggcagcgggcccaccgagccctctcgcgccacgagtctgtgcgccaggctggtctgcggacagagcacacgggcgtcacgcaggctgcactgccggcctgtggccctaagcctgggccacaggaagcgacgagagaaaccctccagggcaggctgaggtccccggaacagagacatgtgaacaaggacagctcggaggcagacaaagcatcacaaagccatcaattgattcacgacctgtccctctcttgtttgctcttgttcgatccaaacaacactgtaaaactatcagaataaacctaggataatattcttaaaaatgtagtcttaggatcaggaatgtctttccaaacatcatgtgagaggtaggaaccagagagggaaatgtagattatagaaaaatgccttcacataaaaggcaaataacagtgatgacaaagttggcgactgtagtacagacaaaggcgatatgtaaagagcaagcaaatcaaacaacgagtgagaagcaacaaagaagagccaggatggagaagaaactcatttgaaaaaaaacatcagcagtcatctaaaaaaaaaaagatctaaaaaaaaaccattaaaaaacctatgcagttggcaaagatattttagaatgacaacagcatcttgacccagagaaacataaccgtactgctgggtgggccataatcagcctgctccttctacaggacagtttggccatccatgtcaaaagtcttaaaaacagatctagcctttgatcttaaaccccactccactcgcaggacacactcttgggaaaggaagctggacacagatggacttgacctcagcagcattcacagggccctacagccagtcagagggtaaatccacgaggtgtgttcacacacaaggacacagtcatccatggggacactcaggttggaaagatcctgtggatgacctggaatcttatttaccatgtgtgcttaagtgccagtctccgagggcttgaatcactgtcgtattccatgtcgttttgcctctagaatgaaggttcctggcagaaaggacactgtcgtattcacactgccccctctcagtagtagaaaatgacactaatgatggacttataaccggttttctcctagctcttctcacaatggattatagaattaaggctgagaaacattttgcctgctttaagatttcactggcatggttagaaagaatatgagctgaaagttactgtgaacaagggcgggactgcagccccggccataagtgcccctcggttcatccgagggtggagcgatgaccacctcggtgtgtgtttgctggagtcctgtgccgggcagcagtccctgggtggcttcctggtgtcacacgcacggtgtcagtggaaactcacacatacttgtgctctgagggcaccgtaggaagggccactcgggagggaggttagagtgtctctcctagtgaaggctgcatcactttactctgttcacatagtaaatggtacagtaatgactaaagggcgactttaaaagtagctctttttctggttttaaaaaaatcagcaagctctgatttagagaaagtgactgagcttgccaaggaaagcatgattccactgtattatcattgtccaggaataaaacaagcaaacactgaatgcttgaaagttgtcatttcctctttataaccaagtcttttttccaaaaaaacaaacaaaccaaacctgcttcacttttagaagtcaagcagccttctgggaactgtctgatgtgctgactggctcacgtttccgctgctggccgtctacatctgccctatggcatgccgtcagctgcccaggaaggccggggccggggcagcacccccactgccgtccccagatcccacctggctttcagcatcgcatgaagctccctccctggggagaggcttccagggtcggggagccctgctacccccatgtaaggacgatgctgaacatccctcagtccagctgggaaaggggctgcaggactgggccagtggccccctcccgtgtgaggacccctggccgcctctggacgcgaagaggaagacgaatggccagctctggcctcgagattacagaggcactcagggaactgcccaggcctaactcaactgaaatccacgaaggacatccaactgtgaccacattttcaagggctagccctgtgattacagtaaagatctaacatacaacacaccaactgcaatctttgtttcttgcaaatcctttgacatcttctattaatttccagtagcttaatttacatgaaaatgcaatttgtaaaaattaacatgcaacttaaactggcatccactcaaataaggcatctctacagtagaaaccattaggtgagtacccattgaaataaaaccgagatctgtgagcacaactgacaagccacatgcagcctttacagctcattctgggaagcaatttctagggcaagttctaaggctgataacagatctcagctatgacctcagcctcacagagacggattgttaaaactcttaatctaaacaagtctttaaacggggaggctgaaaggcacaggtaataaagacgtacaaggaaaagaacaaaggggattaacaagcaagaggcagcagcatgaaatcaactcagtttctaaaagtctgctttgtatcttaagtgtctaaaaactgaaaatggagtggacacgtgggcctttgtacttcaaccaaaacctgtcagccctctggaggggcaggactcatttctaaacatttaaggaagagagcaaagtaccgtgtttgacaaatgacagcctcctgtaagttggaaggaacttaaaaaaaaaataagacacctcacaagaacctcacagtcaggaccatctaagcaggaaacacacggcacagccggctcagccccgggaagcggggtgtgcagcaggctccccttccggccagcacccgccctccccagttgagtagaaactggccctgcgtggaagccgcagggctggcaccaggtgggagctccagacactcgtggcatgagccgggggagcagagtgaagaaggaggaaaaagaaagcagggactgaaggttctggaacattgccctgacccaggtctggtcaagggtgcagcctgcagccagtcctgaggtcccccgcctggctggagcagccccaggagggttctccaggagcagcctctcaacctgcagcacagctggggtctgcccggcagaggtgaggggcaccgccccaccatggcctgaggcttggaagtcctgagatgcctcggagactctgccccgacggtcaagatgggagggtggctggacaccgccctgcggacgagcgcgccgcgcactgacctcggccgggatgctggggacggcgggcgcgatcccgttctccgtgctcacgttcccggagctgttgttgggcgagctgggcgcggagcctggggcactgctgcatgccgagtctaggagggagagacactcgtgagcctgacccaggtcccggcgaggaccccgaggtgtgagctgggttggcctcccgctgtggtggccctctgttctgagctggccgatggtggaaaggacaggaccacagtccccacccaggggccatggagctaattccctgctcccggctgtgctgtcgactcgagaccttcacaaacgtgtgaccccagatgcgcccctgaaaccttctgagctgaacacacactgtcaattttactcttttgtaaatgatcatgaacaccagaaaaagaagccctgaacaatcgttaacattgtaacaacaagagacgagaaagcacagaggccgaacgcccgtgaacaggggaaggtcaagtgcactgtgctcacgtacacagcctcctctgtcagcgtctgctctgagccagccctcgagttttccagacatcctgggaaaagctcagctgttggcctctgtgactgaccaggttatctgacaatgtgtcccggacagtctccaagcagctgtgctgacctgtgtggccccatctcacccaccatggccggggctgaggatggagcgtgtcccaccccggtcctcccaccctcactgccgaaggagccactactgctgtgtgtgcaaacccgtgacgggagcccctgcgactctctatggtgacaggaggggtgtcttgcgtttctgagttctcgtctggctggatggtgtccaacaccggcgcctccaggtacagcctctcagagggaaccagcctgagctgtctgcctttccctcccgagtgcctgcttccctgatagctcctcaatgcaggagaccccagttcaattccggagtcaggaagatcctctggagaagggctaggctacccactccagtattcttgggcttcccctgtggctcagctggtaaagaatctgcctgcactgtgggagacctgggttcgctccatgggttgggaagatcccctggagaagggaaaggctacccactccagtattctggcccagagaattctacggactgtatagtccatggggtcgcaaagagtcggacacgactgagcgactttcacttcactgcctgccccaagcacactgaccacgggacctgtgacgacttaacattctaccccgacctagacttgcaggcacacggagcggaagcctggtccatctcctgaagctggatcccaaaggggctcaacaggcatcttccagggcaaatctccacgccctgctccccgccactgaggcccggcccaggagcgcgagcccatagagctgccagtggggcctggaggactcagacttggttccagctgaagtcggggcaacagtgaggaggctgagggtgccgtgcggatggacggcagtgcccactcccgcaggcccagctctcacggagaaggagacccgatcccaagggcacatgcatgaccccctccacccaggggaccgcgagcactcgagtcctcgccaccgagcagccgtccccctgggaacaccctgcagcaagtgcctctgtccactcgaggccccctgacacccccgcgtctcccccgtgcactgacggtgaccccaggccctggttccccacccaccggatccagagcctggcctccaccaggttaagtcacgttcacactgggaaggccacctgggctggcacgtgtcacaggtcaccctccaacacccaccacgggcatcgccctgcctggccaccctccctgctgtcagcctgcccccggtggcacagagcctcccctctggccctgctttaaacaggcccgcccagcaccatcggcaggtaaacccttcagagtgggaaaccaggacaacttttgggggcaataaaaatcatatgtcatctctgcaacttttcacccatcttcagctcaacagtgtttggactactttttcactctacttcaaggaatctggcctaagaaagtaaatatgaatgcataatcaccatggtatcatttgcatcgacacggtggaatatcattaaaggcgcaagagtgttgtgactaatatcgagtgggaaaggaatcgagtgtacacagggtacatgccagacccgcacagaaaggactggaaggaaatacactcagaggttaacggcatttctctggacagggtcagaggggtggctgcttctcctgtctgctcgccctgccaggcacagctctgatgagggactaggcacacacggtgtgatgcggccaggcccctgacctgtttcatgaacatctgagggccgccactggccgcgccctcacctccgtccctcctggcctccctgtacaggccagaggagccacgtctgggatgccgcggccctctcctccccaggaccccaggagaggggaccccaccctcctgtccagaggaccttattttcccgtcttctggaaagccagctctgttcagagcattctgcaacccccagccccctggggctgtgctggaccgaaacccacccccatctccgtgtggcctgtgcccatacgtcaagctccccctggcccagggggcacccaccgccctcctttcctgcttcccgcatgctgccctctctggtcgatgctgcccagcactgagcaggtgccgcaggccgtgtgttcccagccccagtgtggtgcctggtctctggagtcagagaggaagctgctgggaggtgaggacgcagctcagcattgcagtgcccagcctggtcctgacctcacaggctgagggcgtgaaggccagagccagccccaggacagaagtggccaggcctgaccagtggggccgctgcccccggaagagactaggcctcggtgcgggaggaggggggggaacatgcgccctgcctcttgcgaggcccgagtctgctcggaacccgcggtgagggcggcctggtctctctatcagaaccaccgggccccaggccctcggcctcagacccgacttctggcaggctccaccccggccgcagggcagggctgagggcgcccagctcaccccagaccccgcgctcagagctgaggctcctcccacggcgcccaggagccccttcttcctggggggcggccctgagaactgcgggtctccataaaaccctgtccttggtgctcacggaccctccccgcctctttccaggccacctgggcaacccctctgtactgtgattccaggaacgggggctgtgcgccctctgcacgaggggtgcgccctccggaggcggtgtgccccttgagagtggcgcgtgccctcctgaccgcacaggcccaggaagtggggtgtgtcctcgggaccaccaggaagggcctcggcccgatgggtgtgcttccgcgcgtcggccactaggtgggggccgagagcagcgcgcggacccggcacggagactcccaagctcccgcctccttcccaggaagactgctgtttactgggcaggggcaggtaagagacctgggctcaccacccacagggcgggagctgttaaacactccagctccagagaaccttccacttagaacccctgaccgtcttccgggatgtccgggggcttgactgctctcagctgccctgtgggtccaggctgggggctggacatgctgcccaggaacagggctctgagcgcctctggggaccacctggggccctcggactcagtcctgggggctggcaccgccctcgggactcggagggcgggtgtggatgtggagagatgcaggcttccctactaaagggagagcgtgcaggctggcctctctgagatcggcaggcaggcggtggggtttacactcaaagtacctgtgacatccaggggacgctttttcagagccgtgaccactggcccatctttcctgcgtagcagggggctgctccgtctctcagccactttctgctttagcctggagcgtaatttcaggttgggttcagaagctgcagggaaaggagacgtcattaccggccggcagatacaacgggggccaaggtgcctgggggcggtttccccgactcctacatcacacacgtcctcgctcacctgcaaatcaaagattcccccacgtgtgacagcccaggccggctgcccactcggatcccagccaccgagaggtgctaaggccaacccacctgatgagagggttagccacctgcctgcaggtgagacccgttcccctccgtgtcgcctgacccccccagcacaggtgtgcgggttgctcttggtaacagccctgcttgtgcgaatggagccctttgcaaacccgcagcggtctggcttctgcaccctggaccagtccagtctcacgtcagcgtggctgccttgggaagggggcagcctccctcagcggggccctccctgtggcctctggacacccgagtcagccccacgggctggcacttgggagcccgtagcagcggtgagctcagcaccagacttctgcctttggaggctttatgagttcattcaagcttctgctacttgtggatctgcaaaccggtgagtttcttttacctcttgtttttgtttgtaatcagcagctgattttaatccttctggaaaaggaagtttaccgctctctagagcaacaagcaacaggatcagacttcccctcagagttggaagtaagctggctggtgttataagaatgaggccgcgcgtgcgtctcacggccactgcaactccatcctctggggagcctgggggcagggccgggggtgccggcagtggggtgaccctggggggtgctgggaggtaaaggcgggtcctgggaggagggaggagcagcccgcctgaagggtgcttcccagagaaatgaggtgtgaggcgcgagcaaggtggcagcgtcgccagatgcgtagcctgctccggagaccccgatcacagggcagacgccctctgctctgcagtgtctgtctggatggccaggttccccggcaggatgttcgtgtccaaagaggaaaaggacccagtaatggagcagccatccctgccggcgagaggacccgcttctgtgtttttttaatatttaatactgtttttacatttttgagaagtggagcttcacgtttcatttatttctatttctacgctcagcttcttactttaccgttgtttgaaaagaaaaaaaaaaaagcccagctccccggcgagattaacaggatcaacccttttccccgcaagatgccagctgagcctgcacgaggttgctacagccacatgtccgtcctggggaggagtctgcccaagacccaggaaggacagcgcggcccccgccccagcgtggggggccctgttggcagcctggtcctgacgggggtgtcccgggaggtctcagagcttcggggcccaagagtcagccttgtgagcagggtcaggctccggtcatttgcagggtaagacaagggcctgagagccccgaaggaaggtgacgctggacctagccacactgtccatcactcgggagccaggataaaggcacctgccagcaggcaagggctccagagagtcacgttccgcacagcttctcagaaagctcggaggagctgcacaaccaaggtggaggaggggacgagagccaggagcagctggagtccagggaagaggcccgggaggccgcgaagggcagtcagggcctggagcagagcctctggactgcctgccctggaggacagccttctccgtctgccaaattgtgcggctgaattaaaaacagggacagggagatacccagggcagagctgatattttataataactacaaatggaatacaactttaaaaaattgtccacttgaaagctgtataatattgtacatcaactatacctcaattttaaaacagaggcagacagaaaactaagcaaatgaaacataccatcaacttcaggataaagggaagtcacacacaaactgggatgcagtcaaggtcatgggcggtttacgtgccctttctgtgcattgccgtcatgacacagggccgggcgggccggggccagctgttcctggagggagccttgtggggctctgtgacttatggacagttacttactctgataacaatgaaaagagaactctagaaagataagggcttccctggtggctgagctggtaaagaatccgcctgcaacgcgggagacctgggtttgatccctaggttgggaagatcccctggagaagggaaaggctccccactccagtattctggccaagagaattccatgaactgtatagtccctggggtcgcaaagagtcagacacaactgagcgacttttcttcttttctagaaagacagaggacaggctggaatacaattctttgtagcatacgtgacagacgcaggagggatattaatgtataaagcaatgagaaaaaagagccggccgagagaaaagcatacggaggagctgccactgagccgacattggggaccgtccctgagtgcccggcgtggcggcagatgctgggcccaggggggtgcgcctggccagcacgcacgccacgaggctcagaggcacgggccacactgggccctgggaacgaggcccagcggttctgcaatgcggcgctcagcttactcccgagcagggacgatgggacgtaacagacatgcacgtccctgacggggacggaactgctctttgaaaaggcagagaggtcacggcttcggcacccatcaggctggctggggtgacccgtggaggcatcgcgtgagtgaagagggacgaggacctctcacgagcggagggtgcggctcagcaagctgggctttgtaggctctgcacacgctttctaactcaagagtcgatcctgcagcgtgactataggcccccatatttgagggcagaactaaaagctagaaaacagttaccactgctacaataattgtaagttgagataatataggaaaggtgttgaccttatgcgttgaaatggagtggtaccccagatacaacagtaactgagaggtggagctacagcaaaagtgcaaagcagatgttttctcgacaaagagacagtccatgcgtatcacccgcacacagacacccccccacacacgccggcatagaccccgtctgcgccgtaggcaccaaaccagacacagggctgcttccggaggtcacacgcgtgacgcatgcatctgacttatgttttaacttgtcggaattcagacttaagttgaagaaagtagggaaaaccgctagaccattcaggtatgacctaaatcaaatcccttacgattatacagtggaagtgacaaatagattcaagggattagatctgagagacagagtcccggaagaactatggatggaggtttgtgacactgtaccagagacagggatcaagaccatccccaagaaaaagaaatgcaaaaaggcaaaatggttgtcataggaggccttacaaatagctgagaaaagaaaagacacaaaaggcaaaggagaaaaggaaagatataaccattaaatgcagagttgcaaagaacagcaaggagagataagaaagccttcctcagtgatcaatgcaaagaaatagaggaaaacaatagaatgggaaagactagagatctcttcaagaaaatcagagataccaagggaacatattttatgcaaaatggacacagtaaagaacagaaatggtatggccctaacagaagcagaagatattaagaagaggtggcaagaatacacagaagaactgtacaaaaaagatcttcacgacccagataatcacgatggtgagatcactcacctagagccagacatcctggaatgagaagtcaagtgggccttagaaagcatcactacgaacaaagctagtggaggtgatggaattccagctgagctatttcaaatcctgaaagatgatgctgtgaaagtgctgcactcaatatgccagcaaattgggaaaactcagcagtggtcacaggactggaaaaggtcagttttcattccagtcccaaagaaaggcaatgacagagaatgctcaaactaccacaaaattgcactcatctgacacgctagtaaactaatgctcaaaattctccaagccaggcttcagcaacacatgaaccatgaacttacagatgttcaagctggatttagaaaaggcagaggcaccagagatcaaattgccaacatccactggagcactgaaaaagcgagagttccagaaaaacatttacttctcctttattgactatgccaaagcctttgactgtgtggatcacaaccaactgtggaaaattctgaaagagatgggaataccagaccatctgacctgcctcctgagaaacctatacgcaggtcaggaagcaagttagaactggacatggtacaacagactggttccaaatcgggaaaaggagtacattaagtctgtgtattgtcaccctgcttatttaccttatatgcagagtacatcaatgagaaatgctgggctggatgaagtacaagctggaataaacactgccaggagaaatatcaataacctcagatatgcagatgacaccacccttatggcagaaagtgaaaaactaaagagcctcttgatgaaagtgaaagaggagagtgaaaaagttggcttaaagcacaacattcagaaaactaagatcatggcatctggtcccatcacttcatgggaaatagatggggaaacaatggaaacagtgagagactttattttcttgggctccaaaatcactgcagatggtgactgcagccatgaaattaaaagacgcttactccttggaaggaaagttatgaccaacccagacagcatattcaaaagcagagacattactttgccaccaaaggtccatgtagtcaaagctatggtttttccagtggtcatgtatggatgtgagaaccgaactataaagaaagctgagtgccaaagaattgatgcttttgaactgtggtgttggagaagattcttgagagtgccttggactgcaaggagatccaaccagtccatccaaaaggaaatcaaccctgaatagtcattggaaggattgatgttgacgctgaagctccaatactttggccacctgatgcaaagaactgactccttggataaagaccctgatgctggggaagactgaaggcagaaggagaagggggtgacagaggatgagatggttggatggcatctctgactcgatggacatgagtttgagcaagctccgggatttggtgatggacagggaggcctggtgtgctgcagtccatggggtcacaaagagtcggacacgactgagcgactgaactgaaccgacgcattcctcttgtgattttttaatttaaaaaaaaaagcactctacatggtgtctaagactggtgtttacaccaatcgtttcgatagcgtatttcaggctgctgccaaactcaggtatgaacagggcgcatctggacaagataagtccaggtctcactgggcacttctcatgcgaagaggagtccaggtctgatggacagtgaggtccttttccacagagacactgcctagtatcaatacttaaccacacgtgtcatctctggaagtttctttggtaaagcacaacaaagcctttatgaaaaccctatgaacatattcacacccactttgcaacaagcgcaaagttgagggaagacgtagcaccaaaagccccctgagggctgggagcttaggttggcttgggtcaacccccttcaccccacccagaaagctaagaaagtgccttgtcccgcgccaggaccgcagggcccccgacccccccagccccgcccagacccacatgaagcacacccaggcatagtggtatgcagtgcggcccatgcccacagctacccaggccagcaggctgcccccggtccacaaaccacatcagaaccagatggaccgcgaggcgacctgcccttcccaaactgcagagaaacgtgccacgtgcgtccctggtaacctcgagccacgctactcatggctaggatgagtaggaaggggatgactgcagggcgagctgcgtacactcactgatgtgtcacggggtctcagtgatcagataccctggctctccaccggacactgcccactgtctcagcccaggcaggccctccctggcggcggggggcccaccgggccaggggctgcggagggaaccctgaggcccagagacagccaacgggccagggcttctgtgcaaacccgatgggggggcctcagtcctctgttcgtttggggtaaaaagcgagccctgccctccacgggccaggccccctcccccggagccccacaggtccaccctgggcttggactctgcagctcccctcctcctgcaggactggagcacgtggacagtgctggcctgtcccctgcctgccgcacagctcacggctgggcacctggggagctcccgaccagcgtgctccctaaccactgtggaggtgcgcagggagccagccgctgctcgggctcagagccctgcctgggagtgagcacacgtcctcctggctaagtgccaggaaccccagggtccccagctttctgccatgtgacctagcaaggcctgagcatgagtgtccgccccgggggccacagccctgagtccgtcacagacacacagctcccgcagacacagactctgtccccagggcccagagaggacccccgggagcaaccgtcgctgacacagtgtcctgaggctcactcgccccaaactgcctgtaaagatggagggaaggcggatcaccgtgggattagctgagcaagtgtgtcggctgctcagtcgggtcctactcttcacggccccatggactgcagtccgccaagctgctccatccatgggattctccaggcaagaatactggagtgggttgccatgtcctcctccaggggatcttcccgacccagggatcgaacccaggtctcctgcactgcaggctgactctttactgcctgagccaccagggagctaaatgcatagatagatgtaaattattcagaattagcagcggcaagtgtttgaaaataggtgcttcgagaaagacgcaggacgctgtgctgcactctgtcccctaaggggctgaaactctcccctagagccttggccttattactattgctaatgtgccagggctgctgttttagaagacagacagggcaagcgcgtctctactgagcttctccgcagcccacgcagcgcggggtggggcctcttttctgtcctggggacgcggggctgggggcggccctgctgattatcacgcagctcagggccacacggaaggtggctctaactcggtggccaggagctctgtcctccacgtcctcccctgccccagggtgggcacaagtgctgtgcatacagcgtgcccactttgcagatgagaaactgaggtcaggagagcctaaggaatctgtcatggagcccagggctgcaaaggagggagacacccactgagctgcagaaccaccagccacttgctcagagccagctccccacctccctgggttccacttccaccaggcccaggcctcctggggcaggtgcctggggtctctccttgcacagggccctgtttgactggcggcggcgtggctgatcgcagcaccagctccaggacggggcatggaggacaggcctgggggcggctggcccagatcgggacagacgcttctttctgtggagcctgcaggctctctaggtgagagccacggcccttctcagcacacgacgggggacagccacgcactcaaactggagggcagaagccacgctcacagattcaccggtaaagtgctgccagcctacgcagaaccccagccacgcacgcagacgtctctccgaccaggcaaggctctgtggaccccactgcccactggggtccagctctgggacagggcccctcctccgtgcacccaggatgcgggtcaagtcccctggcactgagcggaagcacctcctctgtgtccggctcctgtttggggctggtgaccccacgtcctccctggggtgcactgcctacacggggcccgcctgtgtccttaggatggggaggcaggggcccccagccctgctccctgtaccccaccactccggtggtgaagctgttccaaagcttctctgtccggaactgaccaaaatcctttgaatgaagacaaattcatgttcgtgaaaaagcagctgccgcacacccccactccatgaagcccggcatttccctcgagggccaggctacacctgccacctccgagagcagagccccgccctccacaaccaggagggcggccaggcttcccaggggcacagctttggggagaggcttgccttgctggctcctgccctcctgagcgccccagtgcaagacccagggctgcttcaatccttcttaaaagccactgcccgcttacagagtcactgctgggcagggtccaggggtcccgggcacttcgcttgtgtctaaacatccttcttctggcttgtgacagagcggccgacgtcgccctgaggaccccctggtgggccccccaatcccctgcccctacagtggccctgcacccacctgtctttctgaggggaaagtcatctttggcgtcgtacatgcccaggaccgggtggttgtaggaggccgacgccccgctctggggcggggagctctggtccagcgagctgtgctgcgtcttcctggagagaaagggggggacagaggctgagtgaccctcagggacctggagcccaggccgtgcaggaagagcacccctgggcgcccgcatggacggttctccctttgacgcgtgggcctggcttggtggccagcctgctgggcagcctggcttcctcctggggcaggactgaaatgatgatacaaggccacctgtgagcctgcgcacctggccacgtgcagccttccccaggcccgaggggctgaggacggccggcccgaggggctgcacacgtggtccaatccctgggctctgcctggccccctcgctcttggggtctcctggcctggcaggcctcaggctgaggcgggtgttgcccccagccactgaggggcctggccccaggacgcaggagggagacagtgggctccaggtgcaaggaacgcagctgttgttggaggtggccgagacctggccggggcctgtagggacagtgctggtggcctctgggtcctggagggcagaggccacgtggggactgtccccctcccagggacggtcaccccggccatctcccctcccctggggaggcagggattggcggcaccctgggccccaggagctgatcctgggaaatttgcttcctctgtgagttggcggacacagccccaaacggaatgacaggcagggcgctgccagcggcggctcgaggggggctcaggcctcaggagggggtgttggccgcgctggtgatgaccgtccgcaaacgtgctgcgtctcgctggcaacactgaaggtgtaatgaattccaagagtctgtactcggtgtaatctgcttaatgacttgaaacaaattagccaacttatttggaatttgttagactatttatttgcatacacagcactccacgtccccacacacctggtgttgtttgaattgagaatgtgagcacttaaacgcttacaggtggatgtttaaatatttgagagcgcaaatgggtgtaaagcacacagtgatcacggagccggatccacaaatgcctgcaggcaggccacagcgggcgctcagatccctgggacaggcctgctgcccgcctgcacccccaccacccccaggacgcacgtcgggggccagggccgtgggctcagggctggactagccatgctcatgccgtctgcaccctcgctgcgtcggactgccaggcctcactcgggggtccagtctggcacaaccccacggaaggtctgagggcgtctctctacccgacttctccaggccacagcctccagggagcatggcctcggcagccccaaaccgtgccatcactgcgaggtctaagctgggagagagttcactttctccttcatgagaaacatggaaaagcccgtgtgtgtgttatgtaatctcaaaacatggataattacgattaatgaaacctcataggtaataataaccactgtcactagattccgatggtagactttgcaattaagccagaagtacgttccgtgcaagatctagcagactttctcctctgtcttgatctcttgagatgccatcagtactgaaaccctccctcccgtccagccctgacgtggaggagcacaggcggggttggcccccaagccgctgttctgcaccgtccaagagggcactcgggcctggggcagtggccaggctgacccagcggagccggacccccgccggtggccgcgaggatggaacctgacttctcagcagccaggcttccccaggcctccaaacaccacgcaaaacggaggaaaaccagctcattgctagaggccagggcctcccaggaagcagtagccgctggccctcctgtgggacccagccctcgtcacagagcccggggctcacacgcgccgcagcgggcgacggccgcgggtgtgagcgagggcaaggcccgtccttgtctgcaggggcacgtgaactctcacccaccctcacacgcaaccagtgcacaggcacacactcacacttacacagacacacacagacagacagacacacactacacaggcacaccacacagaccacatacacagagaccacacacatacagacacagacacacagagatcacacacacagacacaccacacagaccacacacacacacagacacagacacaccacacacacatacacagacacagaccacacacacacacagacacacacacatcacacacccacacacagacacaaacacacagaccacacaaacacacacacagacacagacacacacaccacacaaacagatacacctcctgcacacaccacacacacacagacacagaccacacacacacagacacaccacacagaccacacactatacacacagatacatgtcatacacataccatacacacacagacacagacacacagaccacccacacacagacacaaacacacagacacacacacacacagacacacacacacacagacacagacacacagaccacacactatacacacagatacatgtcataaacataccatacacacagacacagacacacagaccacccacacaaagacacagacacaaagacacagacacacaccacacacacacacacatacacatacacacagacacagacacaccacacagaccacacactatacacacagatacatgttatacacataccatacacacacacagacatacagaccacccacacaaagacacagacacaaacacacagacatgcacacacacagacacacacacatacacatacacagacacacacacacagacacacaccacacacacacaaacacacagacacacacagacacacacacactatacccacacacaccacagaccacacacacacacacacaaagacacataccacacagagacacagacagacacacacagacacacacacactacacagacatacacatagacataccacatagaccacacacacagagaccacacacacacacaaaccacagacatagacacacatactacacacacagatacacctcacacacacagacacacacacagacacacacaaagacacataccacacagagacacagacagacagacagacagacacacacacacacacacacacacacactacacagacatacacatagacataccacacagatcacacacacagagaccacacacatacaccacacacacacataccacatagacacacatactacatacacagatacacctcacacagagaccacacacagacacacacacacacaaatagacacaccacacacacacacgcactctacatacagatacacctcacacacagaccacacacaccccttgcaccccaggggcagaacgtgaggagctgctcttctaactcagctccaacgagaatcgctgtccaggtgttcgacctgcccttccagctgggaggaagcgcctggagtagctctgctgtgatcctggctgacggaaggggcaccgcgtcttaaagaccatcggtcctcagtgaagaagatggaagacaaacatgcctgctttttctttctaaatattgctctgaccatgatacggaacaaagccgaacacaaactcagccatttaccaagtaatttagtaaatttagccatttaactaaattctaccaacaactggcctttcccatgacctcaggtttatgcaggtgaataacatttgtaatcgctcacaccagcactgtccaacagaagtaatacaggctgcgtgtgcaatttaaaattctttcttggccacatgagcaggaacaaaaagaaagcagtgaaattacgttcggtgttcttaatccaatacaccccaactcctatcattgcaactaaaaagtattaaggagatagttctcatttttttcacatctggcgtgtctgatgttcacagcttgtctccatttgaacagtccattttgatgccccggagcccacgtggctggtggctaccatggcaggcagcacggtctcctccggtatgcctaaaactggcggttatgacccaggtacacggtagaaccatgccagtacagcacagagaacagtcacctccacgggaaggccctctgccccctccccggccactgccacttggcttcccgtccctacagaccggctgtgccgactctaggaccacatgcaaatggcatctgaaggcacagactctgcgtcttctccgaagcctgatgtttctaggtatgggcaggctgagcagatgagaaagcaggtgcccgtgttgccatcacctgctggcggacactcagctacttccatgctttggagacaatgagcagaattgctgtgaccgtcagaacacaagtcatgcccggatggaagacttcacctgctcttagggacacacctaggagaatgggtcatgggtcacggagtgggcatataggcaagaatcctggagtgggttgccatttcctcctccagggaatcttccggacccagggatagaacctgcatctcttgcatctcctggcaggtggattctttacggttgagccgcctggaaagctggcgctgggtttgttcagtttcagcccttcctgtgtgtgaggagtcgtctcgctgggcatttccagggtgactaatgatctttgtgaaattactgaccatttgcatcttattttgtgaggtaatcagttcagtcactcagtcgtgtccaactctttgcgacaccatggattgctgcacgccaggcttccctgtccatcaccaactcctggagcttgctcaaactcattgtgaggtattggctcatgtcttttgtctatattttttcagtagggtgcttgtctttttgttattgagttgtgaagtgaagtgttacttgctcagtcgtgtctgactctttgtgctcccaaggactgtagcctgccatgctcctctgtccatggaattttccaggcaagaatactggaatgggttgcccttcccttcaggggatcttcccaacccagggatcgaacctgggtctcctgcattgcaggcagattctctaccatctgagccgccagggaagctctttgaattgtaggacttccttatgtattttggatcaagggctcggctgctcacattcattgtgagtattttgtttctgtctgtgccttgcctttttattttcttaagggtgcctttcaaaggatgaaagtattaagttttgattaagtttacatttctggtttatagttgatgatttgggtgttcaaagatctccttgcttacctcttcaccaacgtcatgaaaactttctcctacattttcttctggaagttttaacaatgcagcttttatgttcaggcccatgacacctgagctgaccatcatgggtggagtgaagctggagtcaaggcgaggtttttctctataaagatgggtttttccatcttgccatcatgcaagtgaacatgacccacgatttgctttggtttgtgtgacaaatcaaggagcctaccaagtccaaggcaaacaggcccattccctctgactccacggaggtgagtccttccccgactgcagcgggcacggccccgtcccctgggaaagagggatctccccaccaagcactggaccggggcaagcaagcctcctccgaagctgggccaccctgcccaccagggagccatatccaaccctgtgggatcctgtccccaggcccagcctgcctgcccccgcctcccccttccagttcccaggggctccttgctgacccctccccagcagcccccagcactggaggtgacgcaaggtcccagcccgtggactccgtcctcctctttgcatgcaagtccatcaccatggcatctattcctggagactggacgccccacgtctccactcacgggggtcctgacaccccaatcttccctttgcatccctgtggccaccatccattgactccggcatggtcaaccatgaccctcctcccaccacaacctcctctgggcccaccgccttcctagcactgctcctgaagacccctgctgctctcagaacagggcctctgctgaaaagcttcctagcctgcagatcacatcacctgtcccaagggaggatccaggagcactgcccacctttacccaacaggctactcccgggggtcctggaccccccaaccccacccagcttctcttcctgccctgcccaacctactacagtgcagggcatttgcctggtagcccccccgcccccccacaaaggaggacaagagccttcccagcacaaaacccagggggtggtcactagtggggagacgacggatcagcgccgccacgtagtggggcccccaggagcacggccccagtgtccagcgcctggggcacgtggccgccatgcgcggctcttcgaggcggccgctgccgtcgcgcctgtggccgggtggtggcgctgctgagcccacagccggcgggtgcgggtgcagccggagcggtcgtgtgttgcgggggctgccgacactcagagtggagatggcttcagaaccaaaacgccctttaggccgaatctactgaaacaaacgcgttcatttttatgtgatctggcagcatgttagtaagactgctatccatctcggggctccaggaagagctatgctttccctccatgaacgaatgataatcttatttttacttaaaaaagctgccgatgaggcttcttccaggacagaatcacctttgaaaggagaagcaaacgatatcaaagcagaaaaaacccgtggggcaccccggactatggtctgaagccacagaactttgtcactgcacttccagcttggcctgggtcggtggccagcccctcagagccacacgcgggcccagaggaaaaacccaacacacgagcaatcccgccaccaagctcaagtcctctttgccaggctcatcggcctctgagcactgacaggcagtctgtggtctctgtcagctacgcaggctctgggaggttcttagcataaaaacaataaaaagaccacaggtgcttttgacttgaccagtaatcaataacatgttgggcagaaattcagtaggtgcatatggatgatttagaccagagttccggtttaacaggtgccttttgtggccaaaaattgcatgagagccaagactatggtcagacaccaccccatgagtttcccttcaacgtctgtttaaagagcagccctctctgcatctggacaacagctgtgtgccctgaccactgcaccactcgggtctgaccacgtctgctgctggctcagggagcatctaatcccacgccctcccggggggagaaccgagcgcccctccggtctcccacggaccccgtgtgcccggggccctccacgtacccgtaccagtagcgagggtcgctggacatgcagtggttcaggctccggtgagccagggccttctttttattgaggacaaactcctgcagcttcatcttcacttccgtgctggccacggcgcctggcgcgggagagagtgggggcgagtgactggaggctctagcccagggccccctgcaccgcatgccggaaaaggcaggacagtgatgggcaggggtggttcccgccgacaccagagagcatctcatgggaaagaggggagtcagggggttgaagggagagagcttcttcccaggaacattgcatataagtgcatttcatttaaagtgcagacggaatcagcacaaagacccagcgctacctaacacaaatcccctgcagaaggaagttctaatggccttccgtaagaggagggcctgagttaggagtgcagctgtgtggtttctttctcatggcagcaaagcgaggccgagcctcagaagaggttttgtgccaactgaagaaccgtgtctgagacagggccgagagtgacagcgatgtagcccgcctcgcggggagtgggcaaggccagggcagcgggcagggcagccgggggcctggccaggtgtgccagagggacagtcctgctctttctagcctacagctacctcctgaggtaaggcgtgtttcatcaagtgggactaaagctgaaatcttgtgttttgtgcttttctggtggtggtggcggttgttcacagccctgttaaagaaaaccagcaaatcagggaaaagacactaataaaggccaaagccaccgccctgtctcaggggctgctggcatctgatctgtgctcctcagagctgcagtgagacaccagggcacgtgggatccgtccgtcagagatacggtgtcttgtccagagaatgcaaacagcattcgcaatggtgggaaaaggcttcatgaggtgagcaaagcccagttacgcattcgcagtggtgggaaaaggcctcatgaggtgggcaaagcccagttacagcattcacaatggtgggaaaaggcctcatgaggtgggcaaagcccagttaccgcattcgcaacggtgggaaaaggcctcacgatgtgggcaaagcccagttaccgcattcgcaacggtgggaaaaggcctcacgaggtgagcaaagcccacttcagaaaacccgttcccgactgggagacggtttcagacatttccttttgttgtttttgttagaaacgatgttggccaacatttatgagtaagtatcacccacccaccaccttccccagtggctcagacggtaaagactgcctgcagtgctaggacagacgcaggttcaatccctgggtcaggaagatcctctggagaaggaagcggcaacccactccagtcttctttatggagaatcccatggacagagcctgtcaggccacaggtcacgggtcacgaagagtcggacgtgactgagcaactaacacttatcatctcccatatgtaggattattcccacagaagggatgagcaaagcagctgtgaacaacaaaacaacattataacccttgaagaatctaagctgttttccaaatttctctatacagtgaccaccacatgccacccactggccacagaccgggaggcaacgttcccctatcggtacttgagagtaccaactaacccgtgtttctgtctataatagtactcaagagtaccacctgactcttactctctatcagcactcaggagtactacctcaccttgtgcctctttcaggagctgggagtacgccctgaccttgagtatccatcagtactcagagtatcatatgacccttgtctcgatcagtacttgggagtaccccctgaccgtgtgtctccatcagtactccagcgtaccacctagtctttgtttctatctgtaacagtactgagcagtacgccctgaccttgagtatccatcagtactcagagtaccacgtgacccttgtctcgatcagtacttgggagtaccccctgaccgtgcatctctacagtactcagggagtaccatttgacccttttctaccagtacttcagggtatcacctgactctgagtctcactcagtactcaggagtgccacctgaccttgagtatccatcaatactaggcagtaccaactgttccttatctatcagtactcaggaataccacttggccttgtcgattagtactcacgtgtaccactcgaccccatgtctctataagagtactgaagagtaccctctgatccttgtctgtcaggattctgaagtaccactcaatcttgtctactagcatttatgagtactgcctgacccagcatctctacaacagtatttgagagtgccctgaccctttgtaacagtactcaggagtgccacctgctgcaaaggagaagaccgagcctcactgccaggtccttgatggccaccaggacgcactggtgtttctctctagggatgctcttcagtgaggcacttggctcaattttctcagagtcttcctgtggtgtgtgcggtggtgctgtgggtctgtgtgtacactttacatttgtatcctttagtgtgacttttttttttttgcagtaatacacttattgtcagccatcacatgttaaggcatgtttaaacctcatcattaatgctgttcagttcagttcagtcgctcagtcgtgtccgactctgtgcgaccccatggactgcagcacgcaaggcctccctgtgtgtcaccaactcctggagttcactcaaactcatgtccattgagtcagtgatgccatccaaccatctcatcctctgtcatccccttctcctcccgccttcaatctttcccagcatcagggtctttaccaaggagtcagttcttcactttaggtggccaaagtatcagagcttcagcttcagtatcagtccttccaatgaatattcaggatttgtttcctttaggattgactggttgaatctccttgcagtccaagggactctcaagagtcttccccaacaccacagttcaaaagcagcaattcctcagcagtccttctttttatggtccagctctcacatccatacatgaccactggaaaaaccatagctttaactagatggacctttgtcggcaaagtaatgtctctgcttttcagtatgctgtctaggttgctcacagctttcctcccaaggagcaagcgtcttttaatttcatggctgcaggcaccatttgcagtgattttggagtgattaatgctgtaagtaggtgttaacatcaccacgaggtccggggggactcaggatgggcagtcccagcaaagtcgttctgatgttcagtctcatcagacccctggctcccagctccacactctgtggttcacatgaggttggccttgttctctcatttctctttaaagtgtggcttatattctgatgctgtgaggtgacagcaaatgcttgtctgccctcagtgcctggcacagagctcccgagaccctgtcacttccaagtaacgggagcatgaggagcgccctgagctctaatggggtgactctggggggccttccggtgggaggagggccaccagcaagacaagcctcaggagaagctcgcaattctcagctccacccgaatcctccagagaggagaggggctcgatggaggtggagctggtaactgatcacgctcacgtgaggaagcctgcacaaactgcaagtgtaggggctcggagagtgtccaggttggtgagcacatccacaccaggaggggggcccccaactccacataccaggggcttctgcactcggagcttttccacagcacctctgtatctgttcctgggcggctcatctttttgaaacacttggcttctttactctctcattggctgtgctgggtcttgggcgctgcccgacattcggcttctttattctcttgttggctgggctgggtcctgggcgctgcccgtgggcttcgtctagctgcggcaagcgggggctgctctccagtcgtgctgcgtggcttcacactgcggtggcttcacttgcagccgagcgcaggcttggtggtcgtggcccgcgggctcagctgctccgcggcttgtgcactctttccagacccgtgtcccctgcactggcaggcagactcctatccactggaccagcagggaagtccctcattttgttcgactcagcccttagcctgtgagatctgatgcttcctctggggagatagtatcagaactgagctaaactgcaggactgccccacccagtgctgcaggaattgcctcttgtggggaaatcctccacatgcctggtgaccagcagtgtcaggagtgaagtcctctgcgggaccggagtgtacacaagaccaaaggaaaagcgtgagaccaaagagctgcgctttcccaacactggaaagaaaagacttgttttttcctaactcaaatgttccagagcttgtctttatggagtttattctagttttctcactgtgatttttttgttgttgtttttcgatttcctggaagttttgaaattgatctttacactggttcgggaaaataatcagcttcattttatccttgtttttcttgtgttgagttttcataaataggttcacattaaaggcagcactccactgaggccatttcatgacagatttcagggtgccgtggatgagggtcaggcagaatgaaccccctgcgcacagaatcgcccacgctgcagcaggacctggatgagagccaccaggaaggcacaaggaaagtgcccgacaccgagtgcacggggaacagtccactggggttttggggcttttgcctcaggccttcttggtgtcctaggagacaacccaccatcgccggagcagcgaggctcgcccaggctccatgtgttaagtgcaagcgggtgagccagccgcctggcagagcggcccagaccgcattacagacccagcgagaccagcacaaaaggccaagggaatggtgatgcgaccaggtggtgggaagtgaccggaggtgtaaaatcacacctccgctttcgagcaaggctccctgggctccctccaaatgcagccagggctgggctcagaccattctgaacactttcagccgtctgtgtctgtctggtctgaaaaatcccactcacaaaaatgctgaaatctgcatatcaggtgcccaacacgcagccccctggcattcctgatggcctctcagccccaggtggacactcgacagaatgcaaatgggagaccacagcaggacacaaggtcctgcaggatacccccaccaggggcagggccaggagaaacgggggccaagggagggtcttggtgtctggctgcagggccgggctggggcgaagtccactgggaggacgagcagcaggacaaccagagggcctgtccaaggagctgaccctcaggtccgtccaaaaggcccgaaggagtaaaccaagcagacgagaagcagggtcctcggggcacaggaccccactcactgggtgtcagctggcccaacttgcccaggaagccctgttaccatggacgcacttgccgctgcagagcgcacggcactggccacactgggaaagtgctggcctccccgcttagccacaacccaggctcgcaccacaggctcctgagctccgaggagcaacaagaacagatgtccggtgccagcagagggggcacacccaggataaacacagtgtcaggctgggcagcagggcccagacatgggcagaggcgcctgggccgtccagggagacgaccaccctggggggactgagggacctcggaggcgcccaccaggccgggacacggatggtattcccgttccctgagccgtctgcggggtcctcacagcaggaggtgcatctgacgggccctgggccaccgcagacacccgaggccctcgtccagctccagggtgggcgcgggcaccctgctgggctctcatggagacagagggaaataaatgcaagtcgccaaaccctcacttccagtttccctgacaggagaggactcagagcggatgatgctggctctgctcctcgtcctctaattataccgccctcgcctctcaaaagacttctccaccttaagtgaaggctccagcagtgacaaaacaccttcagtaaatcagtccacgtcttggattttttagttaaattaatttctgctgacgatcactcactcattcatctgacagccttacggggaatatactatgtgccagcagtgaactagctggtggggacagaggtaagcaagacacagccagccttctgcccgagggtgttggggtagtcaggggacaagctttcaaggaaacccaggcagggaaggggctctgggtggggcctacctgctgggggcagaggccgggggctcagtggtccctgaagcaggtaccaccagacatgtctcccaggttagcgcccagggaaggaatgatcaccctacaaacgggcaaagaacgactctcacgggctggtgtcccatcttctagctccatcttttttttttcccttttacacttttttcatatttttaaaagtttatttatttggtcttagttgtggcatgtgggatctagtttcctgacctgggattgaacccaggccccctgcattgggcgtggggagtcttagccactggacctagccactagggaagtccctatctccacccttttgagccatttttaggcaaagctaacaacttctccaagtgagggcgccttcccccgccccccaggctgtggttgtaactaccagagaaaaatatgcacttgcgttagttccaaactgtccagaggacaaagacaggtcttctgttgaactttttgtttttaaatgaatttaaagacagtgtaccttagagtcttaaacatggttatattaaataaaacagatgaaagagcatgtgttcatgctgaataagatgaaaactgccatcaactctaagaattcactgttttaccaaatcaatagcattaactggtatcaatcaggaaaactgcagaataatttaaaagcaccatgaatgttaaatgtaacaaacctttcaatgaaatattcaaaaaaattcatcttttaaagaaccccaagaaatgacacaacagaagctctgcactacattttcaaatgcttacaaactggagatgctaacgccagggcctccgtgagccacacaaacaagaatctccttcataggtgaggcccgagcagcgtccaacatgcggcctgccaagcctgccttctctcaagaccacactctgagggctgcagggccgatgcaagcatgccaagtacccactgtacacagtcccttattaataataaacccgaccacccaaacccacgagctgaactgctggagctgctgctgcgatgagcctggagggaagcaaagaacattcctacagtttgtcaaggggctgcccggcaggcagaagaaattgtttttgactttgaacagattgaaactgttttcagaagtcaaatcttttcatattttgtgaggcctgagatattatttttattggaagtttctggcagaccgggaggaagcactgtagaccaagctgcctttgagcgacctggtgagtccctgggtttgctggtgagccgggcacacaaacttgctgaccctcaccacctagccctctttcctcaaagaacaacctaccatcactgcaaagaagagcccccgtgggatcacgaggaggagctggcaggagcaggaaagggggcggggcaggagcagagggcggggcaggagaggggcggggcggagcagagggcggggcaggagagggggcggggcggagcagagggcggggcaggagtagaggatggggcaggaggggcgggggcggggcaggagagggggcggggcaggagcagagggcggggcagggagcagagggtgatgtgggagtagagggcggggcaggagcagagggcggggcaggagagggggcgggggcagagcagagggcggggcaggagtagaggatggggcaggaggggcgggggcggggcaggagagggggcggggcaggagcagagggcggggcagggagcagagggtgatgtgggagtagagggcggggcaggagagggggcggggccggaggaggtaccctcgaggaccaggtgggcaactctgggtgccacatgcctactgtctgacagcaaagcccctcacagggcgcctgtgggaccacatgctgttgtcggtggggtggggtctatggaaggcagcccccacgcggtggacacagtgggaggccacggagcctccaggatgctcaggcccctaactcagagcgagggcaaccaccccaaccccggttcgcagtctccaccgcaccttagagtcatcccggagtatcagaaatgaaagctggcgcccatcctccgccccagataagtccatcatgacagcctgtgtgcttgtggttcctggcatcagtgctgcaggctcaggagtgatcagcgcccagccataccctcagcacaagtggtggtgagtggcctgtggtgtagaccagcctcctggggtggttgagcctgttggtgtggaccagcctggcaggtggcagatggggggcatgggaggcagagggcagggaagtggggaccacgtgtgatgggcgccatctggcacagcagggccgcaatctgaattcacagaacaaggtgcaggtggctggccaagcctgcaagcccacttctcctgccagccttccaccctcatgtatgaagtctcggctgtgggctcccagggagtctgtttgtcgtcacccgcctcattgctgtgctgtaatgagctatcccactcggatttaccgattcctgtcaaatactggcacacaagctagacttcatgtgggaaacaaactctgctgacctgctttctacactgaaattctattggacagtgaaagtgcaaatatgcttaaaatacatttattatttcaagagtgaatgctgtaataactgactggaaaagctgttaattttctgtataaaaacaatgactaagaatgtgcaaataaacagagacataaattgaatatgaagagactacattagttacatccttttaggaaaaataatatgctttatgaaagaaattatttataaaaatgtacaaaataatataggcataataatacagattagattccattttaatttagaaaagaccagtgtaatttaggctgcattagagctgagacttctgtggtttcaaaggcaccaccaggagagggacagggcaggtgaaggaagaccctcgcgacacctgtgaccgaccagagaacgggcaagagactggaacaaggaccccactggatgggacatccccatgggcaggagcctaggagaagatgctgggtcccgctatgatcagaggaagcagctgaagccagggggccgctgctcgagctgagatttaaagttaccgcagggatgcagggctataggacttctatgacgtcactgatgggggtgataagcagtccagctgctctggagactggcctcacctgtggaagctgacctgctccacaaggcgtggccgaaggtgtatggagcagcagcgtttgtaagagcccaggagcagcccaaacatccaccgactctcgaacggatggacacggctgcggggacctcagcaggaagcgaagccctcctgctacacaaggacatggcagacaccacatgcatagtgtggggtgaaaggagaaaagtacaagagcctacgacaccagcttccaaagcggtgctttgtgtcggagctgcagggctgaggggcggggcggcttctcctgaactggtcgcaggtgctgtgctaggggtagctgcacagtgagatgcacttgtgggtaattccctgcacacggaagtctgtgcgctactctctatgtacaacacacaccagtaagaagacttttaaaacaatttcaaataacagactttacaagaatcttcaagacatcttatgctgtatctcgtgtgtatataaactatgtatgtaaactttaaaagcttgttaaaatgacttgtacagatggctaaccactttcagtgtgtgcccgtgtgcatagtcgctgagtcatgtctgactctttgcaaccgtttggactatagcccgtcgggctcctctgtccatactggagtgggctgccatgccctcctctaggggattttccccacccaggaatcaaccgtcacctgcgtctcctgcagtgcaggtggattctgtacccgctgagccactgggggaacccaacaactttcagcaggtgaggataaaggagtttcaaggtttttggaggtcagtgtgtattgctaaagtgtgtaaagacttcttgttttacttatgggcatgagacgagtaaaccaccatctggtcaggacatcgaatcctgacacgggtagaagtgcacagcctgacatacttgccggattaacagggcacccatgcgtgcacctgagctctgaggtcttgggagaaaggaccagagcctgggaaagtctacctaatttccagagacaagcacacagaagagtctcctgtctaagatcaagttgggcaactcttgcaagataacggactctgctgggcttcacacaagcacagctaggatggaaagcaaacactggggtcaaagggcaaaaatgggcaacccaggagtcatcacgcctgctctaggtgacaggccatcctaccatctgccactcagaaacactctcagacaaagcaactttcaaaaagttgaggctgaactcataggtgaagctcactatgctgctttacgggtctgagtcatgtctcagtccgccaagagtctgcaaacgttcctgtaaatgcttaagacaaacccaaagtggggccagacgccctctgcagtcgctgcgtagagacaacgctggggaccagccctgaagctggggtgcccagaaacacgcgggcgaggtggctcgtgacgcggctcggctctggggcctgggtcccaggcgctcgtggctgaggggcagctggggagggcgcccgcccgcccgccgcccgccgcgcactcactctctttgcccttctccttgttcttcagctgctgcagtttctgctcccggtgccgcttctgcagctcctgctcctgtcggtgccgctcgagcttccgctggtgctcgagcagctcctgctggtgcttcatggccagcagctcctgctgttgctgtgggcgggaagcagcagacacaggtggtcagagcctcgccccgaaagcaacagtgagacagacacgcgcgaggagagcggcggggggccagggtcccctctctgccggtgtggcccccgggcctcgctcccctctgcagggcccacgtcgccaaggaggaagcggggctgctcgaggacggctcctacacctttcatgctgaaggctggaaatgagaacaaaaacgactgacctcctggaagaaactatgcgtgccaatttatgcaatctaggaagtcgggagtcatgtacggatgtgagagttggaccgtaaggaaggctgagcaccaaagaattgatgcgtttgaactgtggtgctggagaagactcttgagagtcccttggactgcaaggaaatcaaaccagtccattctaaaggagatcaatcttgaatttcattggaaggactagtgctgaagctctaatacttaggccacctgaacagctgactcatgagaaaagaccctgatgctgggaaagattgaaagcaggaggagaaagggaccatagaggatgcgatggttagatggcgtcacggactcaatggacatgagtttgagcaagctccaggagatagtgagggacagggaagcctggtgtgctgcagtccatagggttgcggggctggacacgactgagcgactggaatgccttttcgagagtgacacaaaagagcatgaaagagcgtggtcactttgcaaaactgcttggcacattcttacaaagttaaacacacacccatccgagacccaggcatcccacacccagaactaacccaagagacatgggaatacatctgggcaaagccctgtgcaggaccgcgcatggccgctgtgcacacagcagccctgcctgacacacccctgacgtcctccggacgtgagcccagggacaggagtgcgtgttcttatgtgagaatcccacccggcgatgcgaaagaataaactggacatactggcaaaaacaaggatgggctataaaacaagcaaaatgaccaggtctggtgtcagctgtgggaacaggacagaaaagagtccacctgcagactctatttacacaaagttctggagcaggaaatcccaagacacggaggtaaaagtcagagaaggctgcttcttgggtgaggcagtagacaagctggggagctgcccggggtgtgcactgtctggtggaggtagcgtttacacagacacgcacgactgcccacggacacacactcaggatgtgtgtgttctgttccgtgtaagttagatcacgtttccaaaaatgatgtaactgacaatgtaagaagctaccttcacaatatatactgtcaacaaaattaaaatgcaaaaggtgaatgagaaaagctctttgccatacttatggtgcacagactaacttttatatgcagatggctgtttcacgttaataagaatatgataagcagctactaaaaagctgagcaaaaaaaggccaggagattcaccaaaaagagtttagttgctcagtcatgtccgactctttttgaccccatggactgcagtacgccaggcttctctgtccttcactatcttccagagtttgctcaaacttgtagattgagtcaatgataccatccaaccatctcatcctctgtcagccccttcttctcctgccttcaatctttcccagcgtcagagtcttttccaacgagtcagttcttcgcatcaggtggccaaagtactggagctttagcgtcagcatcagtccttccaatgaacactcaggactgatttcctttacgacggactggtttgacacttttgaactgtggttttgggacgactcttcagagtccgttggacagcaaggagatcaaattagtcaccaaaaaaaaaaaagagtggttaaaaataaatgggaaacagtgttcaacctcactagccatcaaatcccattttcacttagcgcgttggaaggggcaagaatggccaagcggccagcgctgatggggctgtgggagagacatgatcaagcccagacacctgacaggttttcccggaacatcaaccagccaagtcctctgctggcggccagagccgcctgctcccactggacagcccctccgactcatgctcccgccgtctgtccagccctgcccccgcctccccgctccagtgcttggccccccctgcacagcctcagcttcccaccagccacgtggggcctcgggaagccccgagggcctcccctgccaacctggccacccgcccagggcaggcctctgcccacagcacctccccggggggcacttgtgtcctggcagtgactcactcccgacccctctccttcggctggggtgggtcttgccctctccctgtcccatggcgggtgggggcgctgcagtctgtctcctgagaggccccaggactctccgtggacaagcacgcttccccccacgtcagccaccagaggagcgagtgtagacggcccccaggcggcagagcagcgagtgtagacggcccccaggcggcagagcagcgagtgtagatggcccccaggcggcagaggagtgagtgtagacggcccccaggcggcagaggagcgagtgtagacggcccccaggtggcagaggagcgagtgtagacggcccccaggcagcagagcagtgagtgtagacggcccccaggcagcagaggagtgagtgtagacggcccccaggcagcagcgcacctgcccccaactcagggcccggggctcccaggccatatcgtgcagcaggctgtgtggcgatgggcaggagcggacacccagctcagcgcccacccgtatgctccatacacgctgagcatcatggccgacctctctctatggcagaaataaaaacaactgccttcccaacaagtggctgacaggagctggggcaggacgagggtggcagaggccgctctgggtgaccgggtttcaagagtagctctccaccctggctccccagctctgcagtgactgtcgcccgtggtcagcacatctgggtctgaccttcagcgcttccagctggcgttactgtgcctgtctgtaagaccagcttgagaactttgcaaatgatttaaaaaggggtgttttcttctcttctgaaaggaacacggaatgacaccactgggataaaagactaaatgaagtggaaaggagccacgtccctgttactagtttccttccaggaaggagggctgctcacccagggaggttcttctaccagagaaaatgtctgttgatctgcctggattcagaggatcctgccttggggcccaatggcactgtacctgatgtccaggggtacaggccctcatgggcatcaccaggccactgccagccactctgggattctaccagcatcgttggccttcggaaatggacacctcaaagggctgtctggtgttgggaagccaagacagtgcccggaacaacagatcttgggatgaagaacctggcgctcttggtattaccgatcccctcaaactgcctacacacagcccgggctccccttcaactgctcagcgttcatttaatgtgtaaatgaggcataggcagaaatctgctgaatctggtctcacaatatttacgtttcagccagaacccagaaaaggaaagtgagatctttcaattatcgttacaaagagactatggaaacaaccagcctagatcccggtgattaaaattcacaggacgacacaacttgcaaaaaatgactgttgcgccgttttagtgaaaggaacattaagaaaccaggcctccggcatccccagcatcatggcatgaaggagaaaggggcggcagaggatgagatggctggatggcgtcaccgactcgatggacacgaacttgggcaaagtctgggaggtggtgaaggacagggaggcctggcgtgctgtagtctgtggaattgcagagagtcggacacgactggccgactgaacacaggggtccagctcgttttctgcccctaagctctcgtgcccaaacaggagggatgtgccgtggtctctgcgtccagcccaggccccaggggaaagcagaggccgctggcggctgcctatttgctccaggccaagggcagctggaggctcacctggcccgtctcaggagggctcctggtcgcaggtggtgggcaccgcctgcccctgttgtgcctcatctgctgatggctcaggctggggagacccacacccgcacacaggacagcctgggtcggcagggccaggaccggagaggcaggccaggctccgtgggggctgagccgtcccccggggctaggagcaccaggggcccaggccacgcccgagctgagcaagtgggccggcgcggggccttcccggctcctctaagccactcgcaggactgtctcctggggaggtcccacctcaacacgcagtggacgcagcaggcggggagctggccgaggcctctcgaccctgcctccggctgacgtggtggctgctcttgccacccacttcctgagtcactgtgaaaataaacgcacggatttcaggtggcccctcaccacagaacgcacagtgctagcacagcctggcgtggccggggcagagcgggggtcaccctgggggcatggggctgccacggtgaaggccatgtccacctggggctggacccagaagctctgtgcatcaagccccgccaggcggcggtcatggagcttttccaagatggtcaaggagcttctaaggctcaggtggcccactttcggggagaagtccaggacagaccagtaacccctgggggccagagcaccagtctgatggagggggcctcctctaggcttctcatctccaggctcacgagctacttggccacggtggtcagggcccatgcgagactaaaatattcttgcctacggggtcctccgaaatggaaccatgtccatctttatctccctggatttactggctcaaatcaaaaaggcatcctcatttcagttaagttcaaaatcacccttccctccagcctcatggagcacagcagcagtaatcaagaggtcccggggacgtgtcactcaggttctccccagatcggacactcaaatgccacaaagggccagccatccacaggcgggtcagagagaggagggcctgcatcacagatgcttggcgccccggacgcacggacgccgtggacagggcaccactgtgagcggtgtggggagtggggcggtgacagcggcccgggggagcccgccaccccgaccagcccagccccactcccgggacacgccgcctcctctcaggtgggtgccctggagaccagcggagggtcgcctccccctgcagggcactccgacccctcctctctgcggggctcactgccacctggacacacttcccggggcggctcagggctgacgaagacccaggccgtgtcctctggcctctccctgccatccagcacacagcaggtctacgtgcgcccgtgagggtcccgggccggaccagcggcagcgtatttatcagcgagagccagtgaggagagatgagagacaggccgtggtgcaaggccacacgagagggttttctctgcagaacaatctatggctgccagctctggaaacacactcggcgctcctcctcctaccagctgggggtggcgcagggcagagcgcggcatggagcggccatccacgcccccagggcggcaggtgtcttcctagaaacacggagtgcaggctacgagccagccctgaccgtatgtgcgctcacggggtgccgacgggctcaggaatgacgcggcgctcgcggcagccacgcgccttcccgggcaccagggctacggccgccgaagcgtgtcctccaagctcattacaagttgcttcagacgaccgagaagctggggtccaggcagcactcagccacccggggcaggtaataaagacagtaaacaccgtggcctggctcccaggccagaaaagcaggctcctttcagttctatccacttccctgcaaggaaaagtgtcacgtgcttcacacacagctcctaaagctctcctgtccagagagacggtaccaaccacagcaggcttcacacacagctcctaaagctctcctgtccagagagacggtaccaaccacagcaggcttcacacacagctcctacagctctcctgtccagagagacggtaccaaccacagcaggcttcacacacagctcctacagctctcctgtccagggagacggtaccaaccacagcaggcttcacacacagctcctacagctctcctgtccagggagacggtaccaaccacagcagacttcacacatagctcctaaagctctcctgtccagagagacggtaccaaccacagcaggcttcacacacagctcctacagctctcctgtccagagagatggtaccaaccacagcaggcttcacacacagctcctacagctctcctgtccagggagacggtaccaaccacagcagacttcacacacagctcctaaagctctcctgtccagggagacggtaccaaccacagcaggcttctcatacacacaagctcagcctcactagtgaaaaaggatgtgcaaataaagagtggaaagcgcttttatttttcacttgttagataggagataccctgagacctggggagagaaaagccaagctggacacagcctcgcagagagcaggcacacttctggacggagacccgatgagaccaccaaaatgtgtaacacgcacaccatagcatatctttcataggaaggggtttattccgaggaaatctgcctaccggacagtgctgacagtctgggctacaagcaggaaccgcagaagaccagccccatcccccaggatcgcacctgtcagaccaaggcgtcaggatgggtctctaccctgcagtgtagatgggaggggaggtggcagtgtagacaggaggggaggctcagtgtagatggggaggggaggcggcagtgtagatggggaggggaggtggcagtgtagacaggtggggaggcggcagtatagatgggaggggaggctgcagtgtagatggggaggggaggctgcagtgtagatggggaggggagcctgcagtgtagacaggtggggaggcggcagtgtagataggaggggaggctgcagtgtagatggggaagggaggctgtagtgtagacaggaggagaggtggcagtgtagacggggaggggagcctgcagtgtagacgggaggggaggtggcagtgtagacggggatgggaggctgcagtgtagatgggaggggaggctcagtgtagatggggaagggaggctgtagtgtagatggggaggggagcctgcagtgtagacggggaggggagcctgcagtgtagatgggaggggagggggcagtgtaggtggggaggggaggctgcagtgtagacgggaggggaggcggcagtgtaggtggggaggggagcctgcagtgtagatggggaagggaggctgtagtgtagacgtgaggggaggcggcagtgtagacgggaggggaggcggcagtgtagacgggaggggaggcggcagtgtagatggggaggggaggccgcagtgtagatggggaggggagcctgcagtgtagatggggaagggaggctgtagtgtagatgtgaggggaggctgtagtgtagatgtgaggggaggcggcagtgtagatgggaggggaggcggcagtgtagacgggaggggaggcggcagtgtagatggggaggggaggccgcagtgtagatggggaggggaggccgcagtgtagacggggaggcggcagcactggggtcacggggtccagcttcggctctggtgtcacccacgccgggcatgtatgggctctaccagctcctgacggcgtcctcaggctcctgtccatccacggccagtgatcccatgaggtcctggggctggcaggacagaaccacctgtcaccctcctggaagcactctctgaagacccctgtctcctctctacgctggagccacagtcatcgagaaaatccacgagtaacgactagagactgacagaaggcaatggctgggctggaagctctatcagcaagtggaacaaaggctgctgagactgccgaggagagccccagagagggagtcctgggcccgctccggccaagctgtggacggagcccaggtgggctctcaggggtcggggggcagagcagggagggctgcttctgcttgctctcaccgcgctgagcttcagctgggaacatgagatagagggactccctcgataacatgcttagaaaatttaaaatgacacaccaaagcggcaaacccagagaacaccacatccgcccggtgatccgctcagcagtcccagcggatcaaagactttctggacataaacactcgctgacacccacactcacgactcccgagaccctgggccccactgaccacgctccaggacccccttccggggaggaaagaactaagtgtaggacagcacggggacaggctcctgagcggccacaaccagcaagcgtccagaagcagtgcgacgctgtgtcagaaccccagagagagcatccttacccaaggttaacaacttcagttaccttttaaacactctatgttagtcactcagtcgtgtccgactccttgcaaccccagggactgtagcccaccaggcttctctgtccatgggatcgtccaggcaagaatactggagtgggttgccatttccttctgcaggggatttttctgacccagggatcgaacccgggtctcccgcattgcaggcagattctttaccatctaagccccagggaagcctttttaaaaacaccgttccctttttaattataaaatcctattcaaattcactgatggtttaatgacactaatcagattgtgtgctcaagaaatctgtctgacaaacaccactgccaaatgtcaccaaaagatgatggcatgtgaagagagtggaaatcatcaaaacagaggccggctgatgggatgacggttacatagtcttaaatggcttcagacaaatgatctctgctgtaaatggagaaagaaacaattaaagcgcagagaacacgtcaccttgaggtttgtgaattgtgtttctggggctcccatcctctctgcgggcttctggcctgatctgcgggcttctggcctgaaggtctggggggctggaggacccctggtggagggggtctgcctccaaagatgggggccctcgggtcaccgggaggctgggtaaaggactcggaagagacgggctgccctgacctttcaggcttctgagatgacatcaagatgcaggagtctgatggagaaagttcaagaagcctgctggtgaggagaggaaaccgcatcccaggagtgagcagtgcgagtgggcagggtgggctcttcagatggctttcgggattcacagaaaacaggaggctgcagcttcaaggacaaaacagatcgggcggcctgcgggcggcgctcgctggtaccaaacggcggttatctggactgactttggtgaggacctagtcccgcagccactgaccacatgtggccgcagtgcagctggtccacagggaaccgggctctacgtgtctggtccacagcgtgcacccagactcagcatggccacaaccgcttatgtggatcacgggttgaagcgacacttcagaaatacggggttaaataaagtagcctgaaattacttttacctttagcagccaggtccccagtggccccccaaagactccttcctgcctcctggtgtccaccccttggctgggcccctgccgggagggttgatgcctatgacagcagagcaacgtagcaggggtgggtgggggggtcaccttcaagatttgtccagaagacactgcgacctccttcttggtcccttggatcctggaggcccaggtgaggaggacttgaggcctcctgccccaaaccaggggggtgagtgagctgggaaggggatcctgcaggcctggccccatgctcaggtgagaccaccgccctgaccatgcccggccacacctcacgagaggcccggccatctgtgagctgctcccagatccctagcctgtgggagctgagctatctgataacacatgtttgttatttcaaatggctaaaaatcttttgagtaatttgttacatatcaataaatcactcacacagcctcgtttctttgggtgttttaaggtaactacaggaaatgtagaactacctctgaattttaacgtgtacacatttccactgaacagcaaggctctgcaagattctaagcacggtgacacacgtgatcacagacattataagtggtccctcaaccaagtgacatgacctctctgtgcctcactagtgcacgtttcttcctggaacgtttgcttttaaaatctgggatcagaaaaaaatgtaggtagacagtgagcttcccaggtggcctactggtaaagaacctgcctgccaaggcaggagacacgagagtcatgttttcagttcctgggtctggaagatccctgagaggagggcatggcaacccactccagtgttcttgcctggagagtcccacggacagaggagcctggcgggctgcagtctatagggttgcaaagaacatgactgaggtgacttagcacgcaccagacagtaaacaccaaaaagaaaaaattatgttagttttttccttacttatcccatctaaatcaaagtaaatattagctcgcacccccttgcctggaaaatctcatggatggaggagcttggtgggctgcagtccatggggtcgctaagagtcggacacgactgagtgacttcactttcacgcattggagaaggaaatggcaacccactccagtgttcttgcctggagaatcccagggatgggggagcctggtgggccgctgtctatggagtcgctcagagtcagacatgactgaagcgacttagcagcagcagcccccgcaattataaaaagtcagtgggaaaaaaggagagaagatggacaagtcccaagaagaaaataaagacaattcctaaacacctcacccagaggtgaccactgctaatattttggcgcttcttctggctggtaatgtcgctatttagggacatatgtttgtagatgaagtccagcgataagatttctcccctgctttaagcttctacagggtgaccttaaatgctgtttccactcttggccacaaccagcttccaagtgttgacacgcaggtatacaaggcccggtgaggaacatccccaggcatcaacctcagcctggcagcagatcactgaggatgtcctgggaggcaagacagagcgccaggcagggcgggccagcctgggggctggggggggtggtcctgggcagcgggattgtgggcacacacactgggccggcctgtgggcttggagtttgtcctgggctgtggaattgtgggtatacacagggggccagtccagggcagtccaggggctcggggatggtcctgggtggcaagatcttggggcacacagagcggaccggcctaggagccactggggaggtcctgggcagcgggatctgggcgcgcatggcgggccggcccaggggccaccgggcaggtcccgggtggtggggtctgggcgcgagtggcaggccagccctggggccaccgggcaggtcctgggcggcggggtctgggtgcacatggcaggccggcccagggcctgaggccggggactgaccttgatgtgctcgtgcagctgggcctcgtgctgccgcgacagctgctcgtgctgcctctggaactcggcgatgaggatctgtctctgcagctgctgcttctgcttgagcgccaggagctcctgctgcagctgctgctcgcggaggcctggctccgccacgggcagcgggaactggtggtccaggcgcaggtccatgggcacccccgggggggccaccggcagaggcagggccgaggccacgtccactgcggagagagcacagaacagaggcgccggtgaccgggtggcccgccatcctggcccggccccagccatcctccctgggagcccacgctgccacggggacgcccacgccgccgccacggggacgctcatgcagtgagagccactgctcacttcagatgcctcctcccacctcctactcaacaggctcaacaggcaggactcgggccttccaccctctccctccgaggcgcccacccctcaggcagaaaccagcgggaggtcggacggggatacacactaaaataggctctcctgcctctgccctgccctgcaccaagaggccctgctcactcaagggacctgggtgcaggcctgtggccttttctgatgccgtttttgaaagctgacactggctgccctcaggcagaggggcgagcggcgtgcttttctcctttgcaagaagccacagaagagttgtgtgaagggcccatggaacagcgtgtgccctcgaagtggtccagacaggcgcgccaggtgcgccgcgcgttgcagtggtgatgggcgcgccctctgggagacagccagtgcaaggctcccccggatcgcctgcttggctcatgctgcagggggacagcttctgtgctttgctaagaaacaaacggccttcaccgcacggaggcgtggcccacgaacagccatgagttgcctctgattagaaacggaagcagaactgatctaaacgcttgtagatcaacgccaaattaaaagcgaagaggaggcagaaaccaggtctccaattacaggtctcacaaaatacccccaagtgggcgctcctctcaggatgggattatatcagaaaagctgggccactggctgtgggcctccgacttcccagagaggctctggggccgcctccctgagggtctctgtcagagacaccccccgacccccagaagtggagacagcccagcagaggccccggggccccgcctcgaccagaaaggccgctcacaacctgcccagccacaggcctgagggccggaggctgggcctctcctccgggggctcagaggtctagaggagaccccgctcagcagacaggggccccaggccagtctcccctccagagtcatcgccacccaggagggggcctcgttgcagcatctctgcccaggctctctgcagtcaggcattctgatgccctggacccggtcccagggcctccctgggtgagaccggatctaacccagggcctctggaagtgccctccagccctgaccgcccctgccactggggccagtgaggggcttacaaaaggtaggtagtatggccattcataaattctctgtgcttattttcttaagctaaaatactgcttcttgatgaggtaagtggactgtcagagacacagcaggccggccccactttggttccggtggaaaatgacccaggagtggccacccctcgggatagcccatttcagcggtcaccacacaggcaggcccctgccggctgtcctgctgatgagtgaagtgaggtgggaaggcctggctccagctcagtcctgggtcctaacccccgagcccacaccgggggccctggtgtcctggaccaacacgcggcctcgcacctgcaggcttgctcacctgggcagggcgtggggcgctccccgggacagcaggggcctggctccagggctgcagtcaccacctccccctccccgccgccagaactaagcctggattccatccgaggcccccagagcccggggcaggttgcatgcatggaacgcctgggccctggcccctgggaatggagggaaaccctcaacattctatcatttttcagaaaacatctaattctcctctctctgacgtcctaacaagccttaggtaaataccagctcttcgatttttcccaaaatcagtgaggtgcaaactccgttttaaatgtatttgtttttttctagttgggtgtcaggcttgatgtgtgaagggctttttattttatatttatgcgacagaaacggacacaagtgactgttcgcgtgaataggcccagacgatagcggcgccccatcccgcccccaccacacacagctggcagagatggggctttactgacttcattttctttctttgatcatttttatcatgaaacatagcaggatggaaaaactgtgtaaacaacaccagttttataaaccctcagtatttccctccatttgcttcagactctattttaaggaatagaatattatggaagacagggagcagagagcagggagcagggctcaggaaacggactcagaggaaagggaaagtgacttgatgtcttaaaggaaattctgctttcctttctcccgggggtggggaagggctgcgtgttttcctgctttcactaatgacggtgctcagtgctgcctggaaaacatcacgcctgtgtatgacggcaggcttgctggctcttctttctgcttccctggaagaggatgagaagtttttcttcattaaccggttaacctgcctagttctttcatggattaacaggtgagttacttagcagatcccctcaggttagctggcccttgctttgcaaagataaagctgactttgtcttcctgggttacagacacacacacagaatcactgacagattgagcctgcagccgtttattgggcacatctgggtccacgttcatatgtgtggactggcttgcagtgtctctgacactcttcttatctggtcagggaacactattttagctcaagaagccacagagaattaacgaaataaccgtattgcctgccttttgtaaggaggatcacctcatttgccttgatggcaggggtggtcagggggtggcccccttaggtgacatgtgaaggtgacctgagatgttatacaggaacaaggtcaagcctgagacgctgcacagaagacacccacgcactgttcgctcactgcgtcacgttgctgctgttagtcatgcagtcccatccagcctgtgaccccatgggctgtggcccgccaagctcctctgtccgtgggattcttcaggcaggagcgctggagcggggttccaggctcctctgtccgtgggattcttcaggcaggagcgctggagcggggtgccaggcccccctccaggggatctctccgacccagggttggaactcgcgttgcattggcaggtggatctttactgtcggaaccaccagggaggcgctcactgcaccataccatctccccatttctaatttttcacaggcgaggtcaaaaagatgatcagaaatgtccaatagttagcatcttaaaaagctgaacataaaacaactttgagggatctgttttattaacttcaaaaataggacgggccaagtgtttcctacgcctgcactcctcactgcagaaaaacgccagggcctccttctctgtgctgcgtgctggggggttgttcccagtccagcctgcagtgggtctgctgtgcaaagggacaggagagggcagagggcttgagggacgccctggggaagggcccacacgggggccgcagctctgagtgggaaggggcaggtgagccaggtcccagacagccagtgttaagagggcgggcgtgggggcggagacacaggaggccctggactgctcgcttggggcgcagggcctgcatccgcagatcctggggggccctgcaggcccaggtgggggtgccagcggcagggggaggccgggcctcagatgcagaggggctggcatcggggcactgggcgggagacgagggggcggggccgagggcgggaagggagggcgtggcaggcgccccggcgtggagggggtggggaggtccgaggttccctgcgtgcactgccccttcccttgggttccctttgagtctggagcgcagggaacataaggaggaaacacaccccacccctccagtcattccagacaccagagcaggtggcccgggggggggacggcaaggagacccccgggcaacaccatcctgcccgcagagaagagaggggcaccaggccagggcgcggggtggtcacgggcggtcctcaccgtttactgtgagaaagggaggagaggcctgttggaatttccccttttgaggtttcacataagacttcatcctctgctaaagaaagtccaacgcaaagagagaaggcaaagccagacgtcagctctgtcggacaagccgtgcccagcgccggccattccggcacctcgggagacggccctgcggacaggcacatgcgccagccctggcgtggccgcgggtccacggacccaggccaggcgcttctcccgcctgagcgcagcctcgggaggccaggcgggccccccaggcggctggagccccagctgagggatcagacccacagtccccattcattccgctgctggagggtgcgtcagacatgcccgcgactatttctgtatcaaaaactcgccgaaatgccacgagttcccaacagaagctgctggtgcttttgacccaaagctccccgaagaaaacaatgagactttctctacttaaagaatgtggcatcaaaacaaaaaagcctgtattctcatgaatattttatggcagagtagaaaattgcttttataggttgtgccttgagaaacatattaatacaatcagactcatgacgttagtaaaagcacaaagactatattcagagtttcaataagaaatggcaaggctgggccgtgacctataagttctcaatcagaaatagaaaagaaatctgctagtctctaatttttttaaaaaaataaatgatcggggggggaaaaaaaggacactgtaattttccattacatgggttggttcttctgttcataacactatttcctgtcatcacatagacagcaaacaaagagaaggtctattctttagaaagcagggccagagtgtaggctctgttcaagtaaagaacggctcattcagatctaggggacaataatagatgcttcatccgtgtcagcacgagttccgctcacactgacgtttgcctgcctgtgtgaggggaggagagagacgcctgcgggggggaggaggaggaaaaaggacgggggtctatcaaaaacgcataacctatctcaaaacgttttcaacgtttacgacaacacgcgtcacagcccgggggacgctggcgcacgcccgcctcgctccccaggcccccagccccgtgctgactccgctctgcgaccccgcgtgttgtgatcacaatttccaggacacacccctaaacacgcgtcctctgcactcagcagctgtgggtgggggaggcgagacgaaggcccccagggaaagacaagagtctcggggccaggctgcttcagcttctaggacagctgacaggaagagctcctccgggcaaggccaagagtgaccccgggaaaaccatgggccaccccccgcagtgggaccaacattgggactagaaccgccctgcctcctgctgctgcctgagcctgctgtcttccaggtgcgccctccaggtgcggggcccaggagccccgtggagaagcatggcctcatgtgagtgagggctggaggcagggaggtccagacgccctggaggctgcagagctctcgcacagcgcctcccgcacagctgcgccctccccgaggctggccccaggcctcccagggctgcccagggccgccgtttgtgctcaagcccttgtccagggatcgtgcctctgcctgcgcacagaactccagtgagcagtcacctcctccaggatggtggagacaacatccctacctccttgttcccaagactgttactgagaagctgtgactctggacgcgtgccctttgctctccctctggcagaccagctcctgcctgccgcgttcttagcaggaggctctggaagcgagggtcttccctcacccgccgcggagctccacaccacctgtccagtttggcagctcacgccccagtcgtggggaatctccctgggtcatcgtgcagaccatcgccctttcctcctgtttcccctttgggaacttccagtacctggtggtaaatctgcaacaacctgattttctttctgcttctcccacattttctgtgtctaatgctcagctctcttcgagattcccttaaatgtattttctaagtttctcactgggttttgcatactttctgtggctgtgtccctgaggacgaatggaggcaaggatcctaagctgtgagtggagaggggactcaaggctgagcttcgctaggtggtgcatggagctggcgtccattaggacacgccaggcacccatggttggggtctgaggcacccggagctgcagggcaggaggctgtggcggtgggggggtgactgtgcctgctgccctccagcctccactccactccgcccagccccctcctgcccgggtcctgccctggaggcgggacgtggggctgctttccaaggatgccgtggcgtccacccgctgggatcttggctgcacccaagggcggcgtggagtctggccaaatccagtgtgacctgtgacttcaatctccaccttccagacggctgctgaagctgcttccttttctgttccccgccctgtgttttttgaatgccccttacaggtctcgctgccctgggtcttagcagcagcacgtggggtctttgatcttcactggggcggcggggatctggatccctggccagggattgagcccaggccccctgcattgggagcacggagtctcagccactgggccaccagggaaggccctgttcccccatctctgggctgacgacctttctctgcaatacagatatagatagatcattgtttagggaaaattaaaaaaaaaaacacacacaaagccagcaataatggtataatcacctcccaaggatccgtgagccagctccaacaactgcttccctgtggccagcctttccttccacaccagcccactgcccttccttctagattatcctgctgccaacctgccagcagagcactttacccataaggactgtggtatctctaaataaactcttaagaaaacagtcaacctacccaaataagttaacaactccatgatgctatcaaatagccagaaagtattatcatttttttttaagagtctcatacacgtttctgagactttattcaactcaagattcaactggggacttccctgctggtccagtggttaagaatctgccttgcaatgcagaggatgtgggtttgatccttggtcaagagaactaagatcccacaggccatgggacaactaagccctcgagcctcagcgcgagcatctgctgaaagaaaacgtggtggcgcgaagatcctgtgtagccaggagcaaatgaagccccagctgaggcccacacacggcagccggccggcgcggctgtgcactctctccaacctacagatgccctgtcttctcctgcacgcccacgccctctccagccgacgggccgaagactctggtcacccgtcccgcgctgactgcccctgaggtgcagagccacacgacggagtccctgggagcaggaatgggtctggagtcccgggggacgcagctccgattcccagcagggccgccgcccccagagggtctggtgtcccccgggctcctgtgtcgccagcagctaaggtgttccccgatgatgccgtcgggcctgtcaacacggcccttctagccccgtctgccggtcctgagctgctggccggtgtgaaagggctccaagtcaagtgtcacattacccccacagacagcttttagcagagaggcagggccagtccttgacgaccttttatttgccaattttcaacaatactgagctggccgtgccgggtctggcttcgggatcgcagtgacccgagcctctgcagtcctgtcctgacgccctcacacgtcctcgggcagcctgcgtgacggcaccaggtcacccagaacccaccagcggccctggggacagccctcagtgtggctgtgacagctgtcccgaaatgcccctgcacctcccggtccccaggagggaccagcgatgtccccaaggacacctgggctccttcagtgggaaacacggagaccacagtctgggttttggctgccatagtttataatgtgtatatccttactggagcttttgtgaatttcaggagtgagtgaaattagatctgtgcgttcgatctgtcatctcaccatggaacttggggtgcataacttattagaaatatcattcaaaacagctgaacagtcataatcaagttccattcaacatactgatttatatgcagtatcattttccccaaaggtgctcttaactgaattacaattattctatttaatactgtgtgtgtgtataaaggggaaatgaggtagagaagtcagaagtgctttttaatgtaaaaatttaaaaatattctgtagggaaggtaaataagacaagtggtcccatctcagcttctcatgtagacgagtatggctctccctgcttttttgcctcattcagatgtatgtacacaggcgacgccaaagaaatgagcttatgtgagcaactcagaatatagattatgcttgaaaaataaaaataaataacaaacagtatggagcaagaacacactattatgttttatattgttttgttttcagctgagatcagaatgtaaagaaataaacatatatagtggtatttatacacgtatatccagagacctaggttcgatccttgggtcaggaagatcccctggagaagggcatagcaccccattccagtagtcttgcctggagaatcccatggacagaggagcctggtgggctacattccatgcggtcacacagagtcagacaggactgagtgactcacactttacccatgtgttacatgggaaggctctttgcacctggcctggggcggggagagacgcgacgcgcggcgcctctgagccgctttctgcacatgggcgccttgcacacacctgtccatcacgagggagcagcatgcaccttcaggccctggccggcccgggctctgcctccagacgagaaggcagtgggctacccttcagaagcaagcagagacaggtgggagcagggcaagtgcctcaagctgaaggcaggggaaggcgtcaggggcagacgtggcaatcccccaggtcggccctgagtcgctgcagaccacaggtctgcagggtgctggcctgggctagcttcacatgtcaacagggaccctgcaggacacgggtggatgccagcgtcatccccactgacaggcagggaacaagctcagagagtctaagtgacgtgcccgaggctacacagcaagtctcactggcaaactcagaactggacactaaccaggggcgacgggatgcccgcgggcgacagagcaggaagagccgggaggagggggcccgcaggccacccgggggtgttctcaggcggggcggcacaggccaccctggggtgggactctggttctcaggctggacggcagaggccaccctggggtgggactctggttctcaggaggggcggcagaggccaccctgggggtgttctcaggcggggtggcacaggccacctgggggtgttctcaggaggggtggcacaggccacctgggggtgttctcaggcagggtggcacaggtcaccggcgggtgttctcaggcggggtggcacaggtcaccggggggtgttctcaggcggggtggcacaggtcaccctggggtgggactctggttctcaggcggggtggcacaggtcaccctgggtgggactgtggttctcaggtggggtggtcagcagcttgtggacttgggagccacagaggctgggccctgctcagctgctgtgctcagggtgcctggggctccagcagcgcttgggtgatcaggccccctgcagcctgagcatgcatgctctggggctctgagagcactccctgccaccagggccggcggaccccttaggtccctgcccacggctccagctgtggattctgtcctgaccaagggctgggcatccccccaggatcgccagctggctccagcaccccgcaggcccgtgctttccagccaagaaaagcctctacttttcctgaaaggttcacaggggtccgctccgagagcccctgctcatggccgagacacagccccaagggtgcagccagctcgggtccgcaccacccaaccagtcccggaaaacaggctaaacagcaccaccgagcaaacccggctgccgagcagagacgcaaacagcaagttcctgacagctcactttcgctgccaaaaacaacaaggcaccataataccaggtaatgttttactccactgtctcttccccaaagctgggtttcacttccactcactcacacctcttccctaagcgccaagttttcaacgagcttctccctgacggagagcctaaggccatcagcacaccaaggcctggccacccctcacccagcaccgtgagggcctctcctgcagctgccgtgaccctcctcttcaaggtccctgctgcgcctgcatgtctgtggacaccagcgaggacccggtcgggggccagcaggtggggggtgggaccactcgtggagagcaggcccagggccccacttccaggcaccagggcgggcgtccaggtaatgctgctgagagagaagaagctgggcccctggcacaggcacctggtctcaaacgtccagtgtggggtcggggctaatgtgagttcaaatccccctgagggccagcggccacccaggggccctgcacgtgaccagcgttcatcgagagtcaggacacagcctcgagccaggatcccatggcagggaggtgtgaatgcagggagaagactccaggggagctgacctggctggaggggtatctgggcgccgcgggctgagctgagcctgtcttgcctcccgagctgctgaacgccctgcccctaaagtgggcccagcaggcgactttactgagggtggtgaagacccaaggcaagacctggtggtcaggatgcaggagacccccagaagggcacgagctggccctcagcgtctgcacatgtgacaactgaaggccgagtcatgaacgcacctggggacaagcgtccacagcacccaggctcaggttccagcacaccaggggtggaggccccggagagcaggcctgcagtgcaagtgaggggccccaggtcccctagacgtggagacacgccggcttcacaaggaacgagagggcgtgtatttgatgcagacagaggacaagctccggcctcatctcctcagggcggggtgccgatccgtggcagctgctgcggagtgtaggtcagggccccctccgcccccttctctccttttgtcaaagaaagaaaaaggcctttgtaggacgggagcatgcaggggagagaacgcagacaatgaggcagaatccaggccatctcactgttctgcaaaagcagaccatcgaggccctcccactcccttctcacccaccccacctgctccatcccctggcccgggcccctgggcacctgcagcggggcagccccacctccagcagggagggtgcagcctgtgtttcaggcccggcggtgggttccaaagtgtgggccccctcctccccgcagagaaggtcggaggtcagaggcagcacctaagacagacggctgagcatttccacaactggtgggagacacggaagccacaaccaagcagggaccccagcaaatggcagcggccgagacaatctccaagcggaactgcaggctcgggagaagagggtcagcgggcctcgaggacgagcaagctgcagacaaggggcgcgcggaaacggccagagaacccgagccaccccgcgggcagagggacaggtaccaagccagagccacgtgctggggaacagcggtcaagactgcatgcagaacacacacagacgggccacaccagaccgagaaggctgcaggcgcgccaacgagccctcagggaaggacgagcccactgcgagtctgagacgcgggaggagcagcgagcagagaatcccacacacacgaaaacgagtccacacggacagcaaggaggcggatggcagtgcccgacttgtggatggcgtcacagaggaagccctgagggccgctggggaggcgggagcgtcccagggccctgggacccctgccccccataggggtggaggtaggagacagaggttcacaggctgccacacagacctgctggagaccaagaggagggccctcagggtagtggcgggggtgtggctaggtcagtaaaatgattttaaggagaaagaaaaacacatgtggctgctaagcgcccccagctacacacacagatctggtctcccaatggacgcacacaactgcgcctagagtccggccagaaataatcacaactgactctgatcaaacctccaggtctaaccaccgacggacaggaaactcaggcaagagaggtccgctctgaatccaagtcagggaggaaatcaagcgaaatctagaacccagggagacgctgcaggacagacaacccagtatcttcagagatagactgcaaagctcacaaaaagggaggaggaatcttacagatgagctggggacagaccagccaccacgcacaaacattcagtggacctcgtgtcaaacaatgaattacagagacacctgctttaaacaccgtcagggtgaagggataaagaagttaagtgaaggtcgctgagtcgtgtctggctctttgtgacctcacacactatgcagcccatggaattctccaggccagaataccggactggagagctgttcccttctccagcggattttcccaatccaggggtcgaacccgggtctcccgcatcacaggtggattcttcaccagctgagccacaagggaaacccaagaagactggagtgggtagcctatcccttctccagcggatcttcccgacccaggagttgaagcggggtctcctgcattgcaggtggattctttaccaactgagctatcagggaaaccaggatagctgtgaagccgcaacggggtgaagaggacgcggtatataaatacaatggaacttcagccatagggaagaagaaaatcttgtccttggtgaaaacatggatgaacctagaggatattatactaagtaaaataagtcaggtggagaaaggcaaataccacatgagctcacatatgtgaactcttaaaggaaaaacatgaacaaacctaacagaaagagaccaactggtgggtgcgagcggggacggaggctggagtgtgagcgagacaggtgagggggatgggagatccagactcgcagatcagcaagtcggccacggggcgtgacgtcggccgcaggcagcacaggaggtccccacacgaacaagtcccgttcccagcgtgtgttcgtgaagtccagctggtgcacagggtgagccacgtgagcctgggtccccgactaacacaaccagctccacagtgctgcgctgttacagctttacgacacttcccactcataacacaggtaaaaacaaacaagccatcttccactttacagttcagcaccttgaaaggtacactagtccaacacaatagctggcacacagggcctggcaggacaagaacagctaagaagagttactgacgggaggaaagagagcaggggagatgctagagccgaaggggcaccagcaacagcagacggagggcgagctgctgtctcagccacgcctgacgctgacgcaaagcaggtgtgcacctccgaaaggtcgcaacttgaaggtctgtatgtaggggactgactgtatctttctatggtgacaagtggtaactagacttatcatgatgacattttttaatgtacagaagcagggaattactgtgttgtgtaccaacacaggtttgtagatcacgtctacttaaattaacacatacacacaaacttgtatcaggaacatataaacactaggtgaacactgaataaagctaaagaattgttcagttcacttcattaactcagtcgtgtctgactctttgcaaccccatggactgcagcacgccaggcttccctgtctatcaccaactcctggaatttactcaatgtccattgagtcactgatgccatccaaccatctcatcctctgttgtccccttctcctcccacctacagtctttcccagcatcaggggcttttccaatgagtcagctcttcgcatcaggtggccaaagtattggaggttcagcttcagcatcagtccttccaatgaacacccaggactgatctcatttaggatggactggttggatctccttgcagtccaagggactctcaagagtcttctccaacaccacagtttaaaagcatcaattctttggaactcagctttcttcacacatccatctccatccgactctcacatccatacatgaccactggaaaaaccatagccttgaccacatatgttggcaaagtaatgtctctgctttttaatatgctgtcgaggttggtcataattttccttccaaggagtaagcgtcttttaatttcatggctgcaatgaccatctgcagtgactttggagcccaaaaacataaagtctgacactgtttccactgtttcctcatctatttcccatgaagtgatgggaccaggtgccatgatcttgcttttctgaatgttgagttttaagccaactttttctctctcctctttcactttcatcaagaggctctttagttcttcttcactttctgccataacagtggtgttatctgcatatctgagttattaatatttctcccagcaatcttgattccagcttgtgcttcacccagcccagtattttgcatgatgtgctctgcatataggttaaataagcagggtgacaatacagagccttgacgcactccttttcctgtttggaaccaatctgttgttccatgtccagttctaactgttgcttcctgacctgcatacagatttctcaagaggcaggtcaggtgatctggtattcccatctctttcagaatttcccacagtttattgtgatccacacagtcaaaggctttggcatagtcaataaaggagaaatagatgtttttctggaactcacttgctttttcgataatgcaatggatgttggcaatttgatctctggttcctctgccttttctaaatccagcttgaacatcagggagttcacggttcacgtattgctgaagcctggcttggagaattttgagaattactttactaccatgtgagatgagtgcaattgtgcggtagtttgagcattatttggcattgactttctttaggattggaatgaaaacggaccttttccagtcctgtggccactgctgagttttccaaatttgctggcatattgagcatagcactttcacggcgtcagctttcaggatttgaaatagatcaactggaattgcatcacctccactagctttgttcatagtgatgcttcataaggcccacttgacttcacattccaggatgtctggctctagattagtgatcacatcatcatgattatctgggtcgtgaagatcttttttgtacagttcttctgtgtattcttgccacctcttcctaatatcttctgcttctgttaggtccataccatttctgtcctttatcgagcccatctttgcatgaaatgttcccttggtatctctaattttcttgaagagatctcttagtctttcccattctgttttcctctacttctttgcattgatcgctaagaaaggctttcttatctctccttgctattctttggaactctccattcagatgcttatatcttcccttttctctttttctttcacttctcttcttttctgagctatttgtgaggcctccccagacagccattttgccttttttcagttctttttcttggggatggttttgatcctggtctcctgtacaatgtcacaaacctccgtccatatttcttcaggcactctatcagatctaaccccttgaatctatttgtcacttccactgcataatcattagggatttgatttaggtcatacctgaatggtctagtggttttccctactttcttcaatttaagtctgaatttggtaataaggagttcataatctgagccacagtcagctcctggtgttgtttttgttgactgtatagagcttctccatctttggttgcaaagaatataatcaatctgatttcggtgttgaccatctggtgatgtccatgtgtagagtcttctcttgtgttgttggaagagggtgttttttatgaccagcgcgttctcttggcaaaactctgttagcttttgctctgcttcattttgtactccaaggccaaatttgcctgttactccaggtgtctcttgtcttcctacttttatgtcccagtcccctgtaatgaatgggtgttagttttagaaggtcttggaggtcttcatagaaccgttcaccttcagcttcttcagcattactggttggggcacagacttggattactgtgatattgaatggtctgcctgggatatgaacagagattatcccagagatcatcctgtcgttttcgagactgcatccaagtactacattaatatgaaaatggcattgtacatattttgaaaacaagaagatcgctttcttttagagattcaggccctggaatagttacagatgatatgatacactgagtgggatttggttcaaaacgtccatggttggaggtaagaggtgaggtggggcactggccaaacatagctggacaggacctgactctgccaagttggctcatagaacgtggggagccctgctactcgtctttctgcttctgaatgtgtctaaaatttttttatgatacaaaattaaaaagaaaattttaattacatgtctaaatatcttctgagtcaaacaggaaatcctaacaaccacttaaaaataagcagaatggaaaggtaatgaaaattacctatagtaacttgaaagtttctggtcttactaggaggaaactgacaagcttaaatgattgtacttgacaataataaggatataattcataagctagaaagatggatctttagaaaaaaactctagaacaaatccaaggaaaacagatgggaggggagagtaaacacagagataaatggaaaatgtccatcacccttatacagcaacacaattagaagttggttctttgaaaagatcaataaagtagactaacttctagaaaaatatgctcattctctgtgaggctagtataaagccttgtgacaaaaaccaaagacattataagaaagaaaaattacaatcctggccatgaatacagccacaaaattcccaaatcaattattagcaagcttaatccagcagtctacaaaaacaaaacaaaacaaaaacccaaaactgtaattgaccaaaataggtggcattttaaaatgagaatgcaacatctctatagaacatctataaatgtaactcactgcattaatgacttcatcataataaaaataagcatattatatccaacaactattcattattaaagcctttagcaaactgtgaataaaatttctttagactgaaaaggggatttcttaaaaaaaaaaaaaaaaatacagcaagtattgcttctaaaggcgaatgctgactaagacaagattccaggcaacaccactgcagaggagctggctgaggggtaacaatataagcagaaaggcaagacacgccgccgtagtgcagactctataatcatcaggctagaactcctcccctgctttccctggtggcttagtggtaaggaatttgcctgccatgcaagagactagggttcaatccctgggtaggaaagatcccctgaagaaggaaatggccacccactgcagtattcttgcctggagaattccatggacagagaaatctggtgggccatggtgtgaagggttgcaaagagtcagacacgactgaagcaactcagcacgatacatgcatttactctcttagaggaaaacagaaaaagcctccagaacgcattggctctaagtgattagattgtactcgcactgcccttggaacaaacagagctgatgacatggcatccgctgagtatttacacctgtgcgtcgtggctgcctgaacagggcagtgtccagcttcctggacgagatgctctgacacccaccgcttttgcagccccacccactgatgactcggccttcagaacctctggcgggctgcttggcgatggtttacttgctacgtcatgtctctcgaccccatgggccgtagcctgccaggctcctctgtccctgggattcttcaggcaagaacactggatcgggttgccatttccctctccagaggatctttcccacccagggatcaaaccctcgtctgctgccttgcaggcggattctctaccactgagccagtggaagggaagctctgatttttaactctgacgcatctcctcagcagacgcagagccggcacacaaaagaaggtctgtctggggacctggatcctcaacgatgccgaaatgctacaatccctggtttggctgaagagaagtaagtggcagaagatgtgtctaaacaagtgtccacttcaggccgtccccagactagcatatcacccccaagaggggttcactgaaaactctccacatataaacagaaccccgcggccaccctgaggacttgggccaccagcgaggctcgggcagagccggggtcaccagcccccaggcaggagggagcacacggggtggcctcgctggcgcagcctggtggccggcagcattgccccaaagagcaaggtgccctcctcgcctcagtgaggacccagccgacggaatctttgggccctactgctagacacctcagggttaccttaaagttcctcacattttgcagagctgtaatgaaacaaaccaaggtgttggagaaggaacaatgtgttttcattttcttagctttctcaggaattgggcaatactgctttaaggttaataaatcagcaaatgatagatagtaagtactgtggtgctggagaagactcttgagagtcccttggactgcaaggagatccaaccagtccattctaaaggacatcagtcctgggtgttttctggaaggaatgatgctaaagctgaaactccagtactttgccacctcatgcgaggagttgacgcattggaaaagactgatgctgggagggactggggcaggagaaggggacgacagaggatgagatggctggatggcatcaccgactcaatgaacgtgagtctgagtgaactccaggagttggtgatgcacagacagggaggcctggcgtgctgtgattcatggggtcgcagagagtcagacacgactgagcactgagctgaactgaagtatatcatttatatgttataaacagaatagcctgaatgaaaaataacactataactagcaaaatcggaaagtgaacacgataaaaaaaggccgaagaatctgtatgtgctaattatctaatctctcacgaggcatccacgaacactgcctagagtggctgtgtcaagaaacagccatttagctaaacatgtgggcctgtaaacaatcccgcaggaacatgtggacagaggatacagcctcccaagtggccagaaggacgacacagccactcaccctaaaaccaaagaggaggccagagagcccgcaggcaagaagtcagagcagaagcacgtcacacagggaacggcgcatacaaaccggacggagagctcagagctaaacgcgtctgctgtgccaccgagtgtgaatgggatctgttcacacagcaacgagcagattgggtaaaaacaaaatggcaattactgcccacctaggaagcatccagaacagaacgggcaaatagcaaccgaaaggaatctgaggtcgaagcatcagtgttgcaaaggtcagccctaaagcaaaacctaaacaagacgaggcccatttcatgtgcacgcgcgtgtgtgtgtttgaaagtcacaagacggggcccatttcatatgtgtgtctgtgtgtaaatcagtcatcttttgtgaccccatggacggtagcccaccaggctcctctgtccatcgaatttttcaggcaagaataatagagtggattgccattcccttctccggggatcttctgacccaggggtcaaacccagctctcctgaatcgcaggcgtattttgtaaccactgagccaccggggaagccagtcggtacacagcttaccatgagaaaagggtgtcctggagctgcgtgtcctctaatgaaagccaagatggacagtgcagagaagtcagaagagacgtcaaacgggaatagagagctgaccgcagatctgaacttgctctggagcacttggcaccagtgacccaaaacgtgagcacacagaggacctgaataacacaattaacaccgcagccaagcgagccttgagaaagctgcacgatcagagaactgatgactttcaaactcccacaaaacacttaagacgagcaagccacacaaacagaaagtttccaggtaaatacacagaacccaacatacaggccccaagtcctgtgcacactgccacagaaaaagaaaccaataaaaccagaagaaaaacagaaattcaaccaaacgcctttctcttgaacactccaaatctgaaaggaaagtgaagaaaatttataaaataaatctaatgagctcatcacatactgaaaatttcaggaatggattacactgagctcagagagtcattcatagtcttacacacgtaagcaacgtttttaaaaaggaatcgaaacaattaagcactggactcagaaagttcgaaaaggaaccaaaaaattaagccatatctcattcaagaaaaaaagaggaacatgataatagtaaaagaaattaaaggaaatactcaagaaacagaaaatccatagaattgctaaaacatgccatgtggacaaagtgtgtctgtgcttaatgggagcaaaaatgtggaaatgacagttggaggaggttttgaagaaccaggcaggctggaacgttacaagcaaaacaaaacagccctttccctgtggaaatcttcaaagatgcacaaaaccagaaatgattactgggaataccctcatatacagctctgtacaatgatcaacattttgtttcatctgttaacatccattttttttggtaactgcatgggataaaacatctcagctttaaactgataaaggatggcaaacaatgagtcattttttaaagaaacagatttttcacatcaacatcgctgttgttcagtcgctgagtcgtgtccgactctgcgatcccatccgtgagtgatgagggtaggacacgggaaaacgtcagggcgaacaagagcccttctacacactgctccaaacggacgatacaccggacaatcctatcttcagccgggctgcacggccgtagagccgccgctgtaccaccggccacccgagtctgattctcatcagacccgctgaaactactgaagtgcaggcggactctaccatctgagcctccggggagccgcttgaaaagacaggctttctttaacagtctccagagtaataaacacactgtatcaacaatgaagaaagcattccaaacccgagtctacagaaaataaagggacttagatggcacgtgggtctccaggtacagccctctgggtccccgccaccccccaccccgcctctccgggcggttcagaaggagagcagaggtgactggcgcagggacacacccaccgtcccgctgcagttcccccggccggagcccgcggcgttcttttccgggaatctggagtgcataaacagagcagaccaacaggcactcggcgctctgtgagtccagatgaagccgggcgtcgggtccccaccccctccccactctctatctcgggaacttctccttaaagctcttcagaaaatcctttgcctgtttctaatttgttctgcatccccaaagaagagaaactgtctttgggaaatatttgcaagcgcaaattgagcaagaggctgtaaataaaaacctggcgtgcagtgggggaacttggctttcgagaagtgcacaaatgtgcttccgggaaactaaaaatagcagcaggccagctcggtgcaaaaaaaaaggagggggggacgtgctctgagttctcacgtataaaggcagccgacaagacaaatctgagtcccagaggaggcgcctggcggaggaatccagcggggggctctgccgtggtgactttagaaacggtgcgagtggatgagaactcttccacgattacaatgcaggacagtgagacagaaacaacagcagaaagcccagcgtttcatcctcaagcatttactgaagagcccccctctagtccccaaggccatcagctgtggccccagcgggaacgggtgatccaggctgcccgatccagcaccctgcccggctgctcagacggtaactgctgacacctgggttcaatctggccacacccctgcagccacgggccctcctcacctgcccatactctgcgcctgggctgtgctcactctaccatacatcaggttaccccctgaaagccatttggtttaccctaaaccccatggataaaaaacacattatctgaaaattataaatagtttcggtggtctaggaaagccacagacctcctctgcaagcgtccttgccatttcagttacgtaaggtcaagtttacataacagagagaagaaagcatttcagaatttcccctcttagcaaccccctaacgtttgcttatgggtttcacttaacagctgggttgcagtaggagccaatattacttaatagtaacagttgaaatatttaaaaatagaaggtgtttcttccacttggcagcagagagagaagggagggcagcagggggtgaagcagggagcaaccccagcttctcggggggtgggctggcctggcctctttcagcaagcgcctcctggacaccaaggtgcccagcgaggaaggcagcatcttttgggggctctgcaggaccgggagtagggccaggggtgtggggatgtagtgtgtgttgggggtggggagggaaggcggtcaggctcagatttcagtgtctgaaaggaacagctgggacgcttgtcaaaaattcaacgcacttgaagcccctggtggctcagacggtaaagaatctgcctgcaatgcaggagacccaggttcaatccctgggtcgggaagatcccctggagaagggaatggctacccactccagcattcttgcctggagaatcccccggacagagggggctggtgggccacagcccatggggtcgcagagtcagacatgaccaggtgactgaccgtgcatgtgtagggacacggcggaagtgaccgagcctctgtagcgaccggcacaggtggtggctgaagggccggtgggctggcagagtacccgttcccgtggttactgccacccctagcagcagcagtgccagtgcagggatgccaagccctcctgagggcggtgggcctgacctgcggcgtggagcccctggctgggagagcgctgcctggaagacggcaccacggacgctgtccaggacacaggtggcacgtgggggcctggccccctgcggagacgtcacagctacgtggactccatgcagccactccaggtccccagccccagcccagccccctcccagagggggctctgagagaccctttccagcacgcccgtgtcccacgccagccctcaccggcccctgcggtcaaccccctggagctcccatttcggtttggcagctccgccttcccaacgacgtgcagagccgagaccctggggccaccgtgcagtcctttgcatcaatcccggcctgcctgcccctcagtgagccccctacttccatacacggggcagcttcagcctgcccactgcgtccatgccagctccccacccctgcctgcaatttaagctccacaaataacacggatctcggctttactcataaatatacgtgtcccaagcgccaagggtactgacggacgcctgggaaggatgaccactatggaggaggggatgagcgagtgagtgagtgggaccaaagcccgcctggcccttgagcctttccagaccccgttatttaaaactgcagagccgcttccccacgagagttctcccgtccctccttgcttcttctcttccacaacactggtgaccttctagcatctgctcacgttctgtatcatctaccgccaccaagtaggatttaatgaccgtatttagaatcctgcatctgatagctagagaatgaaactcttctacagcacatgctaaagaggcataaacactgaccacagagcaactctcaaccaaagtcagaggcttggtactctctactcacagaaatcaataacaaaagacgacttggaaaactctgtacctccagatgaaaaacacttgtaaacgtgtgtcatttttttgcaaagaaaaaagaagcatcaaagtttccagaggctaccaattagctactatcagctagaacttgaatcctacaaatgggaatttaccaaagcatctgcacctgtctccagagagccccataacctccctcaggaagaagaaaggccaaaaagtaagtgggctaaagcatgttcaacctgagagtttggagcaaggatatccacatactcgcagcccacaccgctcaccaaaagcggaaataagaacaggaatgaagggaggagaaaataaatatacacaggtatcactggaggcagaagctggttctttgacagatgacaaaacagacaaagccagatcagacagacaggtgccctggctcccacgacaccagctctgcacgcgccctgtcccgctggaaacacttggggggtcagggagcgggttcagggggagacccgaccagcaggacgctgtgggcacccctcggcgggcctcctgggctggacacacggggcgctcagggggcacctgcgggactgaaaggcacactgccccctcccctcgggctcccaattctgctccctggccgctcccatcttgcacggccgcccaaggtcactggtcagaccccggcctactgcagcgcccgggagcccgcctgccagggacgcgggggccaggggtgtgggtccgcggctgcgggacggtgcgagtcgctgtgcagcttctccttaaaggacagcactctgccctcccaggggacgaggctgagaagtcacagcaggctaagtgtgagtgctttcccaagagacaacgacagacgtggacgagactaaccctggcaggacacactcctttagacacacgcaagggggtcatagactctggacacagccccctcacaccccgcagccccaagaagagagcagaaaagctggcttgaagaaaaagacagaaagcgctctacccaccgatgacgtgtgcacaccccctcccttcctggcatcaggcgtgcatccagcgcccaaacagaaccaagtcctgggccggaaaaatgtcgtgtcttccacctaataaccactttcagatacaccacgaggacactaaggtttcatgttacagtttctgtatcagtgcagaccatagggtcaaggcggccggagccccgttttttcctgtaaggtggacagccagccagtggcccacctccctgcactgggctccagcgggcgcgggcggcttccgcatcagggacacctggggcgcggggccctgcccggccgcctttggggaccgcctggccgaaccggggcccgctcgattctcacggctctgggccccccagcaggctctttctaactcggcatctatggcaacaaccacaatacaaacttaatggggtggacagctggtgagaaacataaataagccaaacaacccagtttccacccagcaggggggcctgggtctccctcccgccagcactgtgggcactgcagggcgcagctgggagccggccgcggccaggcgaggcagagcgggtccggaggggcggccggccacgggggtgcgggaggagggcgcgagaagccagcccagggcggggcaaagatggcaaatggaacagtcctccagagcccaccaaagctgtgtgcgcattaaaaaaaaaatcacctacacaatcgcagataaaaggcaaaccagagagagcaaggttctaggggaaaacacacatgcgaacaagggccgcctgcctcccagccctgcagaagacacgcctgagcagggcaggggccccggccgccagcgcccccgggagacacgcctgagcagggcaggggccccggccgccagcgcccccgggagacacgcctgagcagggcaggggccccggccgccagtgccccgcagaagacacgcctgagcagggcaggggccccggccgccagcgccccccaggagacacgcctgagcagggcaggggccccggctgccagcgccccccgagaggtccctggtctctaggtgccctgccctaaaggggagcagacaggccaggaaagccatcatcacggaaggcagacccagacagacagacgacaggaccctgcagggagcctgctgcccaaggagaagggagccggccagcagggccatccagagagaagagcggcagtcagaggctaagaccgcccgccccccagctcaggggcccagctcggtccctgatcagggaccagacccacctgccacaaccatgacctggtgcagccagataaataaaagtttttagaaatagagagacacacaaagagagagggtggccccactgcccggatgtccctcagggaggaagctgacctcagcagacaagggggccaggcctcagtatccggagggaaagcgttccccgaagccgtcagagcagccccgggtttggtgagacctgagtgaaagtaccggggaacacaagaagaaaggagacagcagggaaagagacaggagcagcggccccaggagcagcggcagcgccagagggcgcgtgttccttctctgcaaacccagccgggtccgagagctcccggcccactcggaaccgagggatccataagagccccgatggtgcagacagcacagcgggtgcagctctgcccccaaggccgcgcagctgcaggaacacgctcggctcgctcggggccctggggacccgctgtcaaggccaaaggcagcaagggacggtgggaggcggggctggatttaggtccagaggcagaaacgccagggcacgcctgtctctcctctggagacgcaatccacggcgcagaacccacagctttctcccaagaagaactactggggggaggcatccacttccttgcctgtaaatcccaccgcccagtgttcctccaaggcagggggcgaggccttcggcgggagcggccagcgctgagccctgagtccctcctctctcgggagctcagtccccaggcaggcgggggctccacggagcaccccttggcccgagcgctgagggcagcctagccgctggtggttgagctgcggcggttcttgtggccaccgctcaaagccagacgtggcacctgcactgccgtcggtcgggggggcccggaccagccggtggatccacggcaacccgagttccccctctgtgggcagacccgtgcaccaggctcgacgttaaagacggctacgtgggcatgaatcactcaggaggtctgtgctcagtgcagcagagagcaggcgtgcctcagacatgactccaagaaaaagcccgagcaggtgtgaagcctggtgctcaacggaactccgagcgctttgtcattaagcttctctacaccggctggttttgcttccttttaagcagctgtcctgggggacgggggcatcattaaggcctctgggctggttgtggggggccacagtcatgctggaggaagcagcagagccggggggggcgggcactgggacgagcagacccaagggtaccagtgagccgggggtcagtggacagagaagggtgggaagcacggtggggccctcccagccccccgctttctgggcccccgacgccctgccaggctgagagaggacgtgccagtggctcgaggtcacacggcctcggggaggcaggcagatctcaccacctgggccccaggcattgcttaacagtagctcagctgagccactaagcctttcctggcggctcagacagtaaactgtctgcaatgccagagacccgggttcagtccctgggtcggaaagattccctggagaatggactggcaacccatcccagtgttcttgcctgggaaatcctgtggagaaaggagcctggccggccacaatccatggggtcacaaagactcagacacgactgagcggctaacacggctgggcccagccctgaccctgcactgacttccttaccacggagcccaaagcgggagggaccaggaggaggaggaggagacactggacaaaaagacagcctggtgtgtgccatgtgagcggctgtgagcagaggagacagttccctggcccgcgcagaacagagacgagctgcgtcaggatgggcccaggacgaggaagcccaagtccgctctcccttccagcgctgagcaggtggcagctgtgggggcccccgaagctggccgtcaggccttcactgagccccatcccgaccccaggagcccagccttatgggaaaagcacaccagggaggcgccagcaggcagtacaacgggtgaggctttgccgcagcggattacgatccaggatgaactgcttcccgcggggggagggaagggccgggccagctgctttccccaggccacgtgcgtcctcagctaggcacctgccccgcctctcctctcgccagagcaaatggacaacaagaatggcaagacgtgcctgggagccatcctgagttccagccagcctcaagtggtccctgctccaaaacctgaggagggtcaagcaattcggtaacccttgcatggcgcggtggtcggatgctcgggaagattcgggaatctgcggctggagccagacctcactttttcatagcaggtttgggtaagttctccagagttttggaagtgtcttcaagtttccattattctctttaaaaaaatgacacccttgtcacatagccttgaaaggacagctcgggaacgccaacggaaacgcatgtttacggtgagggcaacggcgtccccggtgaggctcctgtgtggtcggcaccttgtcctggtggctgggctggcctagaggtcccagccttctctgagaggtggtccctgcagagcagaaatgggcccgtgccccgttgcatacctgccggctgaccctggggaagctgccttgcccctcgcctctggtggggagtgggcccttggcagtggtgcccagatgagcctctcgagggcccccagggctgcttcctccacgctgctcccggcaacaggagcttatccttcaggccctgcacccatcctggtgctgagcgtctccacggtccggctccaagggagctcgcctgctgggtccgcagcctgcaccccacacactcaccacgaggcctcttttccagactaaacacgcactgcttttataatcaggagaaaagtatgctactttcaaaaaaaataaacgaaagtgattcaggaatggaggaccaaagtgcttgtagagtccgctggcacagcgggcatgcaagctctctgccagggcccagctctcgcctcctcctctgccctcaagtcccacgtctctccccacctatactctgagcttcccgggagcccgcagggtgcctgccactctgcctgcaccccaagtccccacccaggaaggaaaagacaacccccctgagaaggatgaggtggtgacattccacttcatccaaaaaatgaggaaatatgatactaacacagatccctgggtcgggaaggtcccctggaggagggcatggctacccacgccaggattcttgcctggagaatcccacggacagaggagcctagagggctacaggccatggggctgcaaaagagttggacacaactgagtgcacacacacacacacacacagacacacacacagacacgcacacagacacacacacagacacagacacacgcacagacacacacacaacacacacagacagacagacacacacacagacacacacacaacacacacagacagacagacagacacacacagacacgcacacacacagacacacacacagacacgcacacagacacacacacagacacacacacagacacatgcacagacacacacacaacacacacagacacacacacagacacacacagacacacacacacacaccacacacacagacacgcacacagacacacaccccacacacagacacacacacagacacacaccccacacacagacacatatacacacacagacacacacacaacacacacagacacacacacacaacacacacagacagacacagacacagacacacacacacagacacacacagacacacacagacacagacacacagacacagacacacacacacacagacacacacacacagacacacacacacacacacacacacacacacacaacagtaacggaggagctgttatgacccagtggtaggcaaaccgttatatgttttctcccttttataatagaactattcacaactaaaaactttaacacaagggaaaaaatgcaaaaaagaaggaaaggcttgttaacatataaaaagttaagggggaaggtggagaaatcagaaagaacccaaaacaaagagcgttttagcatgtgccttctacaatgcaaacttttctagtgagagagattcttgtaggaatgacctcaagtcttgagtcaagatggcccacaaatagaagggatgaacggtgtttttttatttgaagtaagacttcacaaggactgactgtgtttaaagagaaccattgtcagaaagactgtcgagagggctgcctttcacagccaggaacagacaagaaatgcacaaggtggaggtggggagggccacgtgggcacttgcccgctcacggtaaaaggcgtgcattcacgagagcaagttcccacagggactgctggagtaattcctgcaaatcatagagtctgttttcacaccgccgagtgtcaaaagagtactttaagctcaaccgggattgacataacacacctgaaaatgtctctacccccgtatcataaaaatgtggctctaggatgttcctggtgggccagtggttaagaatctgcctgccaatgcaggggacgcaggctcgatcccttggtcctagaggattccacgtgccaccgggcagccaagcccgtgagccacaactacctagcctgcgagctgcaactactgagcccgcgtgcctggagcccgtgctctacaaagagaagcctccgcaatgagaaggctgtgccccccgactggaggcacccctgccctctgcagcgaagacccagctcagcgaagaataaataaatattctatttaaacgtggcttgacagaaactgtcaatactgattttcaaattattatataggctgaggtccgtatttctttgttgaacgcactgtacagtgcttatgtaaatggggagcgtgtgcttggtcgtgtcccgactctttgggaccccatggactgcagcccaccaggctcctctgtccaggggattctccgggcaggaatactggagtgggttgccatttccttctacagtacagtactcagaatgaccgaaagcatagactcttaaagaatgccctttgctttagcagcttctaaggcggagctcacggcgaagactctgtggccagtgtgcggcatgggcagccccccggcacggccctcctcctgcaggctggtgctcatgggcacctcttctccgggttttacagccacactgcacacgccgacccgtggggtcaccagcaagcgcagcgtcatcctctgactctaaccaatggaatctggaggtgtggggctactggctcctgtgtcctgggggcccctccccgacatgccatctctgaagtggggggcttccccaaaagagagagacggggggtagcagaccacgaggactgggctgggatcagagccggcatggccacggccctgtccacgctgtctccagcgtcctgacgtctacccagggaccaccaccaacagacacaggcttggtctctgagaatcctgcagagacgacgtgattatcccatccagggctgagaccaagacactgggcggcttgcttgaagccacccagtccgtgggtcaccaggattccaggcctccccccgcacccatccagaacttcggtccatgttcgtacatgggaggcccgcatgaagtctccaccagcaggacgtgcttctcaagctgggaggcgaacgggaagccacccgctttctggctcacttgggaaccacctttccacagtctatcaagctactgaaaccccctccacccacacctgggcaagcatcaggaaactaactgcctggagaggcctgagctacacaagaactcggtgtttaaaccaaagctgccctggccagacggactcagggaaagggaaagcggccctctgactctgcgggggtcagacaggatagcggagcatcgccagctgctcgtttcagccctccccccaccccccgccgtcctgggtgaacgtaaacctgctgggcaggtggatgccagcccggggccgtggcaccttcaaggagcactgcagacacccgcagctgcgtgtctggggagacgccagagacagcgctcggcaggcctccgagagttgctagcaaagaaaggagtctctcctttgatgcttccagctcagcctcgacttctttctagccggatggggaaggtgcagccacaggcggtggggctgggggctggggcagaggcaggggtctgcatgcccctcctcatcctagccggccctgcacatgcagacagcgggcacggtgggtccaggcaggctggcatccaggaggtgccacggagcgcaaaccacaaagacaggggccttgcttcaggacacggccaagccaggcccggcagtgctgacctcaaaatgctgacagtggctcccttacatccaccccaggccttctcggggtctgttttattctcagtaaggccaaggagcccgagagaaacggatccagtctctgagctgaaatcctggaggataccagatggaaggtaagcattttacaagaaggagaaagaaaggcttccatagccgtgtagactagaaaaacactgcccagggcgcagcatgcagaaatagggtacatggaatgagaaattcctaatcacagctgacgctttttgctaattacagaaggaaagcggctttgagaaacatcaaggacactttcccccaggagcttgcggccctggacccagtgagacctgccccgtggtgtccccagctcaagcgcagggctccttccttcgaggcctggagttagaccccaaacgagcagttctcacctttggaaagaacacaccctgtcggagctcaggacacagaggacctggaattctctgccacttaagtagcattaagctgcgcccatttcatatccaaaaccatcgccctattttaccccggggaaagagcacgcaacccccttggacctgagaccccacccctttctctccacacctccccaggatggtggagccccagacacccctttgggggcgcccagtgcccagcagggctgggggagcggactcaccggtgctgggcatgtggttcacgcgggcggggttgagcagctccactggctggtctcggccagaaagtccatctggaggacagagaaagcactgggcatcagaaactgctcgtgattcaatgaaagcatttcacacgcggagtctgcaaggagtacttccttgcagacaatgggaatccatgtgtccttctcacttttaaaggagacgggttctattttgatttggggaatcagaaaaagaaaagaccccgtgcacaacaacccaacgagctcggatctccaacagagcaaacaccagtttctggcctgcgggcgtctggctgaggcaaacagccagctgatagccacagcgcatttctggagcgaccacgagcagcaggagagtacacacagaagagctgattgccgccttcccagacacagcccaggggcccagggccaccgagccacagcccccgaggccccgtcgagagcacccaggctgctcccgctctcgggacgggcgaggaaaccaagactcgcaaacccgctcccgggaaaaccccggcccaggctcccagaaccgaagggaccgtttctcacaggtttacctttcgattgtattctgaccgcaaagatggcagaaccagaaccacacccacccttcactcagcacagggtgccatcagagcacattctcccacagatgagaaggaaacaccgggaagacttccaggaatcacacacttgggatgtaaaattagctccaacaatgggtgtgaacattcacggtaacaagggcgtcgtcacagacgctggcgtgtggtcactctcgctagtgactttcaggagaaatcactggtttcccagagcagccattggctccctcgggccagcttacaaactgggacaaaagcaagtaagataagagcaggtctcctgactttatactaaagccttgcttttcaccccaaatggacatcatcttgtggccttcgagtgcattattccatgaccgtggtgtgtctttggagacggtcaaaatccaaggacaaacaccatgaccctgaggagaccccgcagcgtctcccgaggaagcagagaggcctctgcggcgtcatgggcctggagctctctgctcagagtatgatggaccccacacacaagctgatgtttggcctgcccacccgggtcagggaagggaaccgctgggctccgttctcgggctgggccagcttgtgcttcacacaagctgcaaatccgagccccacgtggacatcctcccagccctgctgagtgaggtcaggcaggaaagctgcacgggaagacggtcccgcctcagggtgaggctggaggaggcgccctgcctctcaggaggcgtctccgcaggaaatcctctgacagccgactctgcagaggggccatcaggggctggagcccagctccggtgcccgcagcatggggccgggaagccgggagagcccgcgatgccgggtacacggcccacctctccccactcctccacagactaccatgtcagcccgatgccaccagcaaactctgcactcctcactctgaaagggggatctcagaggcccagacgtgggaggtctcctcgcagaaggcagtagacaggacagcaggggtcaggacctgaatcaaggcgggactgagcaccaggagatcaggccacggggaggacatgcaggcgccaggcctcctctccctgcctgctggcagctctgggagcctgaggctgccagttcagggcgtgaggccccaggagtgtgaggaggactcctaaggtcacaaggtgacgacccgggctgagaacacggaggcgtgcgggaaccccttgagcccctggggcattcagacccaaacacagagggaagatgcattgtatccacggatgggggcagcagggccccaagtggcaggtgagctcagcaggcacacgactgtgccaggcatggacatcagccctggggatgtcactccacatcacgtcggagaccagagccggtgatgagtaaccctgagggcctcacaaatccaggtcccggtctcagggctcacaaagcaaagctgttcagttcagctcagccccatggactgcagcacgtcaggcctccctgtccatcaccaactcccagagcttacccaaactcatgtccattgagtcagtgatgccatccaaccatctcatcctccgtcgtccccttctccgccttccctcaatctttcccagaatcagggtcttttccaatgagtcggctcttcgcatcaggtggccaaagtattggagcttcagcttcagcatcagtccttccagtgaatattcaggactggtttcagagagcacaggttccttcttcaaggtcacgggtatcagtctttcttctacagctttcctttctgtatcaggtttaagaagctcttcctcccgcggaggttgcaaagatactttacattaccgccatctgaaagtgtcgtggtttttcccttttgtgggtaaatctcatctctctggtatcgcttttgtatatggtataaatgtttgtcttttttttttctttctatgagaacagccaaatgtcccattaccattattaagccttactttcaggacctttcggcaacactgattctgttacaagccaaacttctgtcctttaggccaacttgtttatacctgtgccaataatcacactaacagccataagttgacaccaggtcttaccacccggccaggtgaagcctctgtcttctgcaaaatcaccctgggcggtactgggccctaaccacagaaatctgagaatcagttaagtcccaaagaaagaaaaagacagaggtggggagacagacagaaaaaggaagggagggcgttgtttttttcaaactaaaaagtctcttatggatccgtacatgactcaaatgcctcctacccccgcaaaaaaagggtattgcggtctcttccccagccctcccctcggcccccgacacaacaccccacaacagcggcagctggagctcggaacagggcgagggggtgctcatgccgagggagtcggcccgggagaggcagcggagcctcggagccgggcccagactcccggggccccgatccacatgtccgactgcgaggcagagctgggggcgccggcggcctccctgtcctccgtggagaagggggaggaggagaccgtggcaggtgaagagccattccctcggcctgaggacagagcctgctgccccgtgatgggcccagagctgggacccgcccccgccggtgccccggacccctctgtgaagggcgatgtgggggacaggacacgcactgtgaccggctgggaaagagaaccgggaagggaggaaagaagaggaaaaagggagcctgactgggaccgcaccgtgcccagactttgggggcagagaaccttggcagtaccgtgtgtcccaactcatgaacacggagcatcacttcatcgcatttctctcaaaacggttttagactgttgagtgcagagatcttgaccatctttagtttattgccagacacttgatacttgaagtaaaatattatgtaacccatggactgtagcacaccaggctcctccatccatgggcttcttcaggcgagagtactggagtgggttgccatttccttctccacgggatcttcctgacccagggatcgaactcaggtctcccacgttgcaggcagacgctttaccctcagagccacaacggaagcccccaaacactatgaatagtactttaaattttagctgctatttgctggtttttagaaacacagtccgagtttatatggtagctttgcaccatagcatcttgctaatcaacccacattcattctaatcgttcacctgaagttattttggactttctacatgtagaaccacatcacttctgatagtgactgctcttcctctccagacccgcagcatttttgtgtctttttctcaccttattctacagctcagacttagagtacattattgaacagaaatagtgaaagggaacacccttgtctggcttgccatcttactgggaatgtttgcaattatttcaccagcaagtataacacttgttgtcggtttctgacataagtttattagtttaagaaaagttccctatttctactgtgcaaagactactttaaaatcacgtgtgtgtgcttaactttattaaacttttctgtatcaattcatacagtcaaataattccccttttcatctgagaatttccttttcttgcgtctaaccaacttgcatttctggggtaaatggacttggtcaggtccagtgagtcctgagacaaaaggtaaggctgaagtcatacagatagatgggatttgagcgaggtccggactctgttctacttttgattccaaagtgttggcaacccagcctcgcatttccgccttagctccacacttgctctctcgtcatggacgtgaaagaactggaaaaggcactattctgaaaggtgcttagtggggctttctcaacgtaggtcaccaaaatgaagtggggatgacaaggctgcctgtcacccggttcgtttttttaatttttagaattgttttattattcttattgctgctttattcatttttagttttgggccatgccgcgaggcacgtgggatctgagctccttgaccaaggactgaacccacgctggtgctggggctgaccggctggggtgacaccgtccgccaggcctctccacagcagaggtgctcgcttcttccccttccacacactgctctttggaagaaagccaatatgagctgcccacacgtgtcaaagggtctgagctctcctccccacacttctcaggagctaggaagagtgggcctgctcccgaggaggccacaggagcacaggggacccagggcagcccggtagtgggacctccgggaggaggtgcaggggggcagggcccggctgggaccccgaatggggctcagcggggcaggcgggaagccggccctcggtctgcgtctcccggacgcacttgcaaggtcagcgtgcgagttacttctgtacctcccgggctccagagcctggtgagaagctaggacatctcagtaagaatgatggtcttagcccccgctttcccctccctccccgtgaactcaggtgttattacagggaacttgctagaaggcctgcaaaggaaaggggatccctccccagcacatgtctgagtttggggtttccctctgccgcctggatcgttaaggctcctggacacgtctgcgatgagggtccaagggtgaggaggccccaattcctggatgtggggcctcagctgaggagaaggcttccaaatctggagccacaggcgggcggggcctggcggaccggggctgtcggagggaaggtgctcagtgtttcggtgtggggccaccacgagggccgatcctcccggacaaatgctctgggtccttccagacggactcaaggagaaaagacaggctcctgcggtggggatgtgtgcgttgctgtgtgtgggctgctttcaactcgacagaagagagctttataaaaatcagtccccctttataagaaggacaaaaccagcaggcagtcctcgcgtctggtcagaggcttgctgaccgagccccagtgaggacggaagggaccggcctgggcgggagggttggcgcacagggcggggtctgcgggccaggctcacctgctgaccctggccctggcccgcggggtgcccagcccctcccatgctgtacgggtctgtgcagagcgtgtggggtgtcgcaggacgccagcgtgccctgcccctgacccgtgggcctgtggcaccctcctactgggagcctgaccctcttgctcattcacaccacggaaggtggctcaggagcctgaaatgccacagccacaaacgactcccgaggtcggaacacacttgcgttccccgggccccttcgcctggcgtggaggggtctccatcgcccgcgccggcaggactcggcccctcccatcctggcctcccgccgctcagctccctgcctcctttgccaacaggccctcgggcacccctttccttcccagtccacgtcccacggggtccccgcccagctgacaccagcctcgctccaggctccatacactcaggacagccaggcgggcgcctcccccccgtgagctctgctaagagccaacagcactgcgaaccattagatgcttcttgtcctcatcatgcacgttgtggaagaatgacccagttctataataaagcttgtgtgtgcccattaacgtgaattaaactttaatgagctaagtgttatgaattcctgaggcacgtccaataccgtttgcggatatttattaagagaaaatataaaaacggaagcgggacctttttcctctagagcagtatttttcctgcaggaaaatcaggcaaacttcacaaaggtgaaggctgctctctgaggctttcctgtgcttgccctgaaaatcgaatcccctccagctagctaccagattgcaggaaatacgcatttcaaggcacaggttcaatcagggccaccgggaggctctgagcaggcaggtgggaaggagaggatggcaggtcaaacgccccggctcccgggctggtgggcgagcccctacaggctagggactgcaggtcgggggctcaggcccaggtctgcaccttgacctgaaaaagcgacaaagccgaccagcaaagtggaccccagcttggatgtaagatgatatttgggaattagtattcattttgttgagtgtgataaggggattacacctgttagaaacacacaccaaagtatctatgggcaagtgctgtgacatttgggatttgttttacattctccaggagataagcctggggaggggggtctgatgacatgggaatggtcacaaagccgggggttttgatgggcacaggggactctcaccgcaccaactaaagctcatctttttttttttttttcctggaattcttcacggtaagagtttctgagaggtgccaagacaagccctcgcttcctgttcagtagcatctgtcctcacttcacacaggccagtacactggtctaaccagttctttcactagcattcctaaccatctccagctgattaccagcccctagctgtgcaggcaacggaaccctccaaacacacgttcaactcagcgaaggggtcaagaaatgatatttcctgccgtatcagtaaacatggatgccacagtcatcagcgattccggccctccaaaagtgaatttctgagtcctgagggcgctcaggaaggagaacagtacctgcaatgtggcagccagcaggctgcagccatgccctgcgggcagcacccaggagctcgggacgctggccccagagagctggggtacatgagaaaggagtgacttcagggagcccagactcttgcatcttcccgtacgcagaaaagcactaaatccctgaaactgggttgtctggtttccttttcttaacaataacctcgtgatgttcagaccacctgccctttgtcgtaaaacttctatataacctggctcctcccgttgcctcctcagagcagctctctcagggctactgagatgccatctccctggcttgaagtcctaaaaatccccacggaataaggcgtaactctcaactttgaggctgtgaccattttgtaaggtggctggatcctgggctcctgagatgcatggggcacagaccccagctgatgtcaggtagacctcagtcctggtcagggtgggactggccctcacctacgtgagacacgacccactgaccagaaagccaggtcgtgaggaaggacacgcagtgagcgtgatcacgggctcccaggaggggcctggacctcagagctgcccgtgggggagcacacgctgtcccatccctggggttcacgtccagctcgagctgcaggaggggaaggagggaaggccagggagggatgcttcgcgggtgggcagtgctggagccctggaggccaggcaaacgccagctctgtcctccctggcccagggccatgtttcctggaggcagtttcccagcccgcctttcggaagatggtcctccagggactgtctgcccctccccagcctccccaagtggagcccacagctctcagctgtccccacagcctggcccagctcaaccgttaataagtgatttagaaaatcaggagagagtgtcctaagcccgcctttgaaaacagatctgtctctgctctggggaggatgtccatctgccctgcggggaggacgcaatcgggtgagtcattccaaagctgtttgctagagctctggaggcggacaagggaaatgacctcggaggcagaatgtgcagattcttggagtccgagcaagaaatcatagacgacagaaggtccacaggggcccgagcaggcgcacacggtgagcctgcatctccgtgacttaagaacggcaaaaaggaacacagctactggcaaggactgagaaccagctgaggcccacctgtcgataagcaggcttcctccagctgctcagaccagcccgcatgcctctgaaaagccacaggcaaactcgccaccgtgaattctgcaggcttcctactttctgaactaacgacctctgaactgccgagcggtctaatggacacaactccccgaggccaccccctcaccgggacacagcagccctctgcgtgggacaaggccgtgtcttggaggctgggtggccccgggggattcggggtccgccaggacaggtttcccccgaacacggagggtggtgagtggtcatgtcgcttcagcccaggctcagtttcctcctgtgtcaagtggggacgtaaactgacccggggtaaataaaagaacgtaagtgaaggacaataacgtgcccctctcacttcacatgtccctctgagacacgcgcggccccgtctgcgggcagaaccaacgcacgcccagtcccacggcggctgatgggacgaagcacctcctgaaaccctgagtcagcgaggaaaaccactggacggatgagccggtgcccagcccgccttccacaccgccgagcgttaaagactagctggaaggtgttggtggttaagcaacaggaagccagaaaagaggtgcctgttaataagcagcttgtgagaagtgagtcacgaacacagaacaataaacccacaatggccatttggagcaagttcacgcaggcaagttgacagtgtggctggagcgcgctcatgggggacgcaccctgcaggctctgggggcacagactctggtgctgagaggtcacggcccgaggaaggcggcagaggactggcatgggagtgacgccagaccaacagctgcaggagctggggcccggaccgggccgcctccgcccgcgcggcacccacgccagcctccccttgcagccacgatcatctcaagtcaacgtacaagtgcagctgaggggccaccgcggggtggacggggaagcctgcaacacgggctttgaaccttctcaggaagcctgcctttctctcatgtttgtactacctaataatatacagcttgtagttttggtttcttaaaaatgatttccattgtcttgattttctgaaaggtaactttataaaaacaagaggggacacgcaggccacccctgcagaggcacagtcccctggagggggcgctgctccaacagtcccctggagggttcctgcagccgtggctgaaccgtcacccgctccgaaccacgtgaaccccttgtggccgagaggccgctgtctcgctgcaccagctgccggccactcaaaggtgcccacgcacgcaagagaatggcatcgttattatttaattcaaaactccccagcacatcccttcctccactaaaactagcttttccaggtgctgggaaaagctggtatacaagcagcagaatcactgttacatttgttacacagaatatggatccactgtacagagcgcagcttctcctgaaacaagacaaactgaaccttatcattattcctcttagaaccatttttatacaacgtgaacttcagtttctaaaaatacagcggttgcactccactgtgttctattttaaccttctaaaaatagagctactgacaggagcagcaatttgctgttagacactagctgtgcggatgtcggtgacaggatacggatttctgtcctttgccttctcttccgtgggtggcttggcaccctggcgggcggcaccgaggcttggctgggtccaccgagaccgggtgccaggtgccatggcccaggtctgctcctgggtgcccctgacctcacacgaatgacctgacctcagtttccacatccgtaaaatgggctaagtggcagtcctcacccagcagggcagacgggatgagaagaagctcccgtgtagaaccctgagtgacccccaggcccaaggggcaggctgcctgggaaaccctagccccagagccaggcgtggccgccttctctcccgccagcaggcgggttagttctcagaagatttagcagtaactaaggaggcacagggaaggagcagaataggagggcagctcctgcccccggagccccagggacctgtggagccctcatggggcaggcccaggggcccctgccagccacccccaccctgctcttcccaagtacagacgtggcccccagccacactggaaagtggcaggctgcttcccagtcgccagtatgttaaaaatggctgtttcaaaaaaccttccaaattttgaaagcttcacagttctaaaaacagagatatatccaaattttagacgatactctctatcttctgtattccatatggactaatttttgaaagaagaagaaagtagaaacaaagcatttctctccccctcccctcaacacagacatgcacactctgaccacccagccggtgctctggaggcacatcggcccgctaacactcacttgcccttggtttagaaaccgcacgccccaggctgggacttgaactccctgccttttaagtgaaatcacacaggtggtctctggacttaatgaagttcgggttctttatgtcttttcataggaagaattcagtgagagacaaaagttctaggtaagaaagtgaatttatttagagaaacacacaccgcacaggcagagtgtgagccacctctgaaggcaagaggccctgaaatatgaggtgggcaagttatgggctgggcgatttcataggctgatgagtgggaggattattcaaactattttgggagaagaggtggggatttccagcaacggggtcactgcccactctttggtctcacatggtcatggtgcctacatttgtgcatattgagcatatgttgatgtaagtctgggtgaactccaggagttggtgatggacagggaggcccagcgtgctgcagttcatggggtcgcaaagagtcggacacgactgagcaactgaactgatgtatcatgatgagcgtacagtgatgctcaaggtctacaggaagtcagatcttccaccatcttggacctacttggctctaaccagcttttgtcatgccctatggctatggatatccttttaaatattgtgccctgctccctgcctgcctatttcagtttcaggatgaacagccccctggcctgggcagccagaggctccacctggctaagctgcctgaacctctcactgcccagcaagtgtcctgggcacccacagtgggaggagcaaagcaagagcctggggcatatttctatccccaaagtttacctccttgatggattgcactgaactgacgacatatcttcatcttctcataaaatattataatcattggaacagagtcatctcctatccctcaaaattcaacacagatgtgaaatcatgcatgtagtcctccactgtattaatttaccaacaactaatagaatcatgaggcaaaggaaatctgtagaaatttcaccaaatcaaaaccaaaaaaaaaggagcctttcttaatctataaccaattcctttggttcttatacctatacagacagattatgtctgactgctcaggcatgagggcgattctgtaatgaaatgaagatgagcaccattaggtgggtactcagttatgactgatggggcattaaagtaaccgcagacaattagaaagaatggcaaccggttcaatgcaacttcaggaaagaggacctgggaaacaacagtggtcaaatctgggccgcttggctgaagatctgaagtaacacaggcacctgtagcagaaaccgactcacactttgggaaacacggctaccacgagcacccaacgcccagaggtggccaagacacagaagtgactacaacctgaaaaagacacagagtcaggcctctgggctgctgaacctggttagggtttaagtcatccggagaatcctatacagtctcagattacctaagaagaaacaacgctggacggagagctcgcatttcaaccagaaaagccgagagacaataaaataccttaaaacagccgagtgaactaccagtcgcctacagtgctagtgctgctgccgagtcgcttcagtcgtgtccgactctgtgcgaccccacagacggcagcccaccaggctcccccgtccctgggattctccaggcaagaacactggagtgggttgccgtttccttctccaatgcatgaaagtgaaaagtgaaagcgaagtcgctcagtcgcgtccgactcccagcgaccccatggactgcagcccaccagcctcctccgtccatgggattttccaggcaagagtactggagtgggctgccattgccttttctgcacctacagttctataccctgctaaactatcattcaagaagaagaaaaggacatttttatgacaaacagaaactgagaaagtttaccacaaacaaactcctgttgaaataaccactaatggtttatttcagaaagtcccttccagcgtggaggggtgtaatgctaggagcaagggcaaggaaatgcaccactaaccatgtaagtgcacacagataaggaccggctaccgagctgacaccgagcaccaccgactcacgaaggttactctcactatgtgtcatcccgtttcctcaaacctttgctgcagtgccgctgtgtgtgtgtgtttcaaaatcactgtctaaaatacctagtgggtttcctcttaaaaacaatgaaaatcttcaacataaacaagtttcccctcttcactttgttaaggtaggaaactaatgaccaaagtttagctcatttttgaataattccctggtgtttagtggttaaaaaaaaactacctgccaatgcaggagacacagcttcaatccccgggtcaagaagatctcctggagaaggaaatgtcaatccactccagtatttttgcctgggaaatcccactgacagagaagcctggcacgctactgtccacagaggtcacaaaaagtcagacacgactgaagcaacttagcaagctggtgtgcaggacttaaaaatatgcatttctgtgctctccttctctctgatgaaccatcatctgtactttgctctgatttctgtatctttactcatctagcccttgttaataaaataagaattaactatagctacctctgaaactgcactggctgagtcccaaagcgctccacacatggtctggcttcttctctcacaaagaggaggcaaccagtgagacatggcccagcccaagtaactctttacaaccgtctttgcagaagcagcgtttggtagcactgagaacacagtaatagctcatcaatccaacttttaaacacaaaaagctacaagaacatgactgacagcaatcaatatggtgttccacttgacactgtatttgcatattggagagcccttctctgaaatcagctatacttgtgcagaagcaactctttgtgagacataatcaacaaaagattgcttatcctctgctacattcggaaattagtacaaagtaaccagctcttggaaagggataaaccactttatgcaaagacttttgcaaatgctctctattaatgcaaatattatgtttgtcttttatttgaatgcaaacagcatctgttttgcacagtcaatgccaccgctttgtagtttgtgctgagcaactcaagtgtgttccagctgctttttagagcttgaagcagatttccagagagccagcgtcacaaaaggaagggcagggaagagagcaggaagccagtgagcggagtacggttcctgcggctcttgcagaggcttcttcgctttttaggcaagagaaacaaatccaagcatgaactccagaacttgcttctggagcagttgggctttctgtgtgggattttcttttttaatggttctaaggaaaaattaggattgccttttataaattcttttgttgggaaaatacactcagaagagaaacgtgtgttggaaaggaaacactgggtggcatgaggctgctatcagagtgcccagcgcaggagcaaggctgctcccctcgaaagctctgccctccccccaccgcgccctccgtctgcggtgagagtgccgatgtgggaggctcctcgccaacaccgccatcctaagatcactggatccctctgctgtctgccacagaatcgagagtcctaacagggacaaaatcttgacggtgtttctttttaaatccatgcccttaaatcaacgaccagttcagtgctggtagaagctgggtggatggatggatggatggatggatgggtgtgtggatgaaataaatcacggtctaaatgaggaaacagataatatgaaaaacctggcctgagactcttcagattccaaatacattcagcccccagatctctacctcagataatatgaaaaacctggcctgagactcttcagattccaaatacactcagcccccagatctctaccccagataatatgaaaaaactggcctgagactcttcagattccaaatacattcagcccccagatctctacccaatcaagagttcttggaaacagtgggatctcaaaacattaacaatactaattttaccattccatctgtacagaatgcagacatattaccaatcagacacattagacggaaatctccatggagtgggctggagaggaaagggggagagccttggtactttcagaggcgtctcaaaatgaacatctgctctcatataagcttgccattaaaactccagaatgtctctttggacagataactctaaaccttctaacaatccctttaatggtcaatttcattattaattacatttcgaattgactaatttccccagataactgctgaacatcttctgctactcatccctccgccggattcatataggaagagatttggcttggacaaaatacactcagaacatcagtatttgaaggacggataaacgtgacttctccaaaaaacacaaggtgcaacttaagatgaaataggtcatttgaatctcagcctagtctcaacccactccagtattcctgcctggagaatcccaaggacagaggagcctggcgggctacatacagtccatagggtcgcagagttggatacgactgaagcgacttagcacgcaacctaaatgacatccagaaaaaagctgaagctgtggagagaagaaatcagccttaaaacgcccgtgttagggttcatccagttcagttcagttcagtcgctcagtcgtgtccgactctttgcgacctcatggaaccgcagcacgccaggcctccttgtccatcaccaactcccggagtttaccgaaacccatgtccatcaactcggtgatgccatccaaccatctcatccactgtcgtccccttctcctcctgccttcaatcttccccagcatcagggtcttttccagtgagtcagctcaagggtttatgaaagaacaggaagttgaactcaggaaaagtgaaaggaaattataaagagtaaaacaattaataaaacagaaaaaagatacaaataacttaggattaactaaacaaacaaaccaaaaaaatgggttctgtaaaaagactaatagaataaatagaaaaacctctggtaagaccaatgaaaggatttaggctgtcacagccggggccgggggcgtcactggcgtccgtctgggagactccagttgtcgctgttgtttcgccactaactcgtgtctgactctcttatgaccccacggagtggagcccgccaggctcctctgtccatgggacttcccaggcaaggatgctggagtgggttgccatttccttctccaggattaaacccgagtttcccgccttggcaggcggattcttcaccactgagcctccaggaaagctgggagagattccagactgctcagtatcctataaagtgcaggacagcaccgcaaacaaagagttaagtggccccaaagaacaacagtctcacagtgaggaaactctactacagctcttagggatgtgaaaaaggttaaccaggaccttaaaacaatctccatgcaaatactgataaaatctaagagctgcttgaaaactacaacttaccaaaactggtatcagaagaaatataggacctcaatagtccagttagtttgaaagaaataagatctgtaatttaaaacttccccaggaagaaaactccagacacagatgacttcacctgaaagttctatcaagctttcagttaagaaaacttccaatctgacacaaagcccttcagagaatataaggaaaggaaacaattctcgacttttttcatgagatagcattaccctgatatcaaaaattggcaggaaaaaattttacgtgttaaacttattcactaaggcgaaagcaaaaatcataaactattagcaaaccaaatccaatagcatacaaaaaggatactatatcttggtcactgtaagttcagttcagaaatgaaaggtgggtttaatttttttttaatcagtataattaaccacattaacaaaataaattttatatcatctcaatagagagaaaagaagcatttgatagttctgcatacattcatgaggaaattaacaaaaactaacctcatatgaaaccagaaacagaaagccccaacagcgatgtgatgatgggttcttaccaaaaccaaccagccagcaagacccaccacaacattgtatcgacagtgacacagtggacgttctcctctgagacccggagccagggagcatgaccactattcaagcagtaccagggctcctggccaacgcaccgaggcaggaaaaagacagacagacataaaaaacggaaaagaaaaacaaaactgtcactgcttgcaatcagcatgtagaaaactacaaagaatttatacagtagtactggaattcagcaaggtcaaccgaaggccccggtggctcagtggtaaagaagcctcgcttgcagtgcaggagaggtgggagacgtgggttcattcccgggggtgggaagatcccctggagaaggaaacggcacttcactccaacatgcttgccaggaaaatgctatgggtgtagaaggctggagggctaaagcccatgaggacacaaacagctggacacgactgagcaagcacgcaccagcgccacaagaaaagcagaggttgctaatgggcaccaacgtgagagcaccaaccagccaggggcacatctcacaaggggcgtgccctgcctcggcgtgaaacaagggagcaaggctgaagggcacgggaggccgagcagcctggtcactgctgcggttccggcccctcctccccacacccctgggcctcccctgatttccttcactcctgctaatccactgaaaatgctcttgccagcgcaaccttcctgaaacagcatctgggacaccctttgaccacaacccacgctgcatacgtttctaggtggagagcccaggtcccgaggtctcagtgctcagcacccccagcagaggtgcagggggcccagctgataatgtgggggccgcgtgaggacacccccagtcctcccgtgcaggaggaagatttccgggcctgctccgacaccctgaagcaactggacagcctgtctccagccctgcgcaggcctctgtttgatcagctggtgtcttgggcgaggaggagtgtgaggccctctcagtgggtggggggccctctctcagtggaggtccggatgtccacccagagatgctctggaatcctctatactccaggaaaggctcccctgggcagggtgaccctcagccccgacccccagggggtcctgtgaggccggtggacctactgtgcaggatggggagcggggacaggagtcaggaagggaaggccccacccacatggcccacaaggaaccgctgagggtgcattctcggtgggcatgggagaggagagcctttggggtcagcacgtctaggggggcttggagggcgtcaaccacccgtgcacgggggaggctgacactgcacgggctctgtgcctgagacgggaccggggagctgggacctggcctgggtcactggcccccggccgggcaccacctccaggctgccggatcccccgtgctgcccagggccccgaggagggctgggtgcgggcgagatggcggtgcacagccctggaatgagaaagtctcgcttcactgatccaaacggggaagccagtggtggcatggaggaggggagtcaactcagcggggcctgaggtcactcctgtgctgtgctcagctgtctgactctttgtgaccccatggctgtagccctccaggctcctctgtccatggagttttccaggcaagaatgctggagtgggttgccatttccttctccaggggatgttcctgacatagggattgaacccacatctcctgcgatggcaggtggcttccacctgggaagcccctttagcaaggggagctagggctcccttttcccatctgcccagctgagcttcctgcagggctccctgggcctccggggaagaaagcaggacgccctggtgcagctgcctctgtccgttcagctgaaactctggagcctcgctgaaggctacatcaggtgtaggttttaaatgtaagcactgctgctgctgctgctactggctaagtcgttgcagtcgtgtccgactctgtgcgaccccagagacggcagcccaccaggctcccctgtccctgggattctccaggcaagaacaggcatctccaaatgtgattttcacttatgagggcactgagagagcatgggggcaggaaatgggtttccttgggctggtcttccagtgtttacaaggaatgtacgagcgtgggactccgtggaggtcactcagcagcctggatgctctgtcctggccagagagacgtggtgtccgctgcaccgcgcgatggccaaccacacgtgactcaccgagaacattccctatgggtgatgaaggctctccatcccatgcagtccacaaaggaccctgtcaccgcgcggttctacacgcccactccgggccccgcagaggaggaggtgggtgctggggccccagggcggcgagaataaagcaccatttctcaggaggacccctgggtctatctgcaggcacctctgtctccactcatttcccccagagacgaggtgcagtttccaggccaggcaggatctgtctcctaggaaggctgtgccccgcttttccacccagagtggcagtgtccacgtggggtccaggggtctgccgtcaccctcggtgcagggggagggtggggggtggccacacctgctctgtccttccttcctggggatgtgaaactgatcagaacaccccccatgctattcacgtcagtccgtttctcttttgtccatacgctggaagctggctcagaacattccaggctcaggaaacgcctctcccccgacacggcaggccagaggccaaacacggacgctagggcccaggccactgaggcaggcaggggcttggggcctggcggctgagtccctgctgaagctgagggctgggagtgagtcctggaccccctggtcccccggcctggggtcatccaaggttagcctgtgcaccaacacatagctccctgaccccaggtgacaagaggccctctgcacaaggtgtgctgacccccagggtcaagcacacctctcaggaaaggaaaaaaaaatcacagtttctaacaaggctccttcataaaaggaactgtgaactgcttcctttccaaacgtgatttctcagcaaatacaactgactttcttatcaggaaatcactctgagaccaacaatgggtgtggtttcagaaagaaaatcactcctccgagaagccaagggctcacactcagaaacaggctttccaaaaacaaaaacctcagtgtccgcccccagcccacaaagccggccaggccgctcagctctcctgggtgccatcacggcggcggtgggacaaggacagtcccagggggcaagaggacgttgactggacagccacctgctcctgggtttttgcccccatctggacaagtgtccctctcttgctggaggcacccagaccccctccagccgggagctgaactctcccagggaagctgattgtgtctgcagggtatcgtgttccaacggtcccgccaggggcatctggccacacctcagcccagcacagccgcagattccagagcacagccatcagcagagatgacctgacccctcaggatgccgtggacacagctacaatctctaactgttccaggaagggcttcacacacgccgacggctatagagagaattgtacactcacaaaactaaccacgagccggaaatgtcaaaccacagctctgcagcactcacttcctcaggagagtacggggagggtgtgagtgtccaagtggaccacgagggctatcacacgaaagggcctgtgcaccagcagccctctgcttccacgtggctgctgcaggggtgagaccctggggaggaggtggatggcggcccctccctccccagagcctctgcctctgggcactggccttctgcactgtccatgcggaggaccaggggccaggctaggtcagctggtcacttttcatctcaatgtctgctgctcatggtttccagcttctggacttttagagagtaactcctcatgttactaatgcatagtctttcaaatgccatctcaccaaagaacaaaggtgttctaaaaagacaaagatcatcaaacatttaaaaaaagctgtacaccaaactataagctatgcttcaactgcatacataaatcagcattttctttcctgtctaaatgaaatcaaaggtttatcacagtaatcaggaacgatctattcgactgtcatttttaacttttcctaacttcactcattccctctccatttgaggcacgaatgggtgctgggtggaggtagccgggtcaggccactgaccgcccacagcaagcttgagcctctcagggacgggcaaagagcctcagacaagccaagagatcagagagaagattggaagaggtttagaatttcttgggttaaatgtgattctggaaagatgctgagtcgacatgcttgtatgtcaagtatgaagatattcatcagaaaagtgaacacatttctgtcctcgagtctgagttatcgcaaagaggaatcaacatacttcatcgtgctgacgtttaccaagtgttccacaaacacacacgcctcatctccgaaccgcctgggggacggccccaccccagcagccagaagcacctggaggcctcgggagagcaggggtcccaggtggacagcagggccagccgaccgcccggcctcctgttgaaggcgaggaccccctcgaggctgcgaaagaaaagagaacaggatttcccaggaaccacgttgcccggggcaggaggcagagcttccctttgctctttcatccccatcagccaagcgtagatcagaaaaaactggggaaaatgagcagctctgggaggaaatgagagtccggcttcgagcagaggccaactgggagccccctctcgggccgaggggcagaaggcccagagccgccccggcagctggacgtgaactctgcagcctggaaggagggagggcactggccggggggccgagggtcagctcctcccacggccaagcttagagcagccccgtccttcctgtggacagcgtcactgagaagcaccccaacgtgcctatctgcacttagcccaccaatgaatgaaaggcacccacgtgtcctcgccgcccaccccagccaccagaagggctccgacagggtcggcagcaccaggcagcctccgagtgaccccctgggactcggggggcctcccagccccgcagggcggcggcaggaagtgccgagtccccaggcccagtacgctcaggcgctgaggtcaggacgtcaccctcctgccagctcaggcagggttcggtttcgcccaaggccccggccatgggatgcctgccccaggcccacctgcctcgccagccccgccagcccccgtgtgttcagaagctgagctggacggagggtggacacagcaagatgactctgagctgggagcaccccccgagacacggcgacagtgtgcacacccacgccacgtgcaaggatgagccagtggccacaggcctggggcgcgtcccactgcctcagccatggctcagcaggacctgccaaggcctcccgggggcccactccccgaacctgctctcttcccttaaatgaggagctgacacaaaacagaacatgtgactctgagcagaagagctcgttgtgcagggcggccctcgagcccagggccctccagagcccggacaccccgggagcccagcccagcggcgatgctgaccgtcagctgccgtgaagcctcgccggggcgcctgtgccaaccttcgctgcctggaccacgtcagaacctgtgggaactctgacagcagcatggtggtgacagggaggggcgtgctcagccagtcgggggacggggccatggccccctcgtgtcacgctggaaagggaagggcgcgctgaccaagcgcaaaaaagagaatcccgctgcagcgaagcgcggagacaaagaggaggaaaaggcttccaaatgagaattgagaggaagcacgcagttgctgggggtaagaaagtaaacaggtgcaccttaattggagatttgatagctcctgggaattggaccaagctccttgtccccaacaagtaagttctgcacacactcaaaatctttctaatgtgctatgcatgcaaacagggaacggcctgcattcttaaatcactgaaacagtcactcaatacgaggaagttagccagccggctgacaggtcaccatggatgcattacctgtgaggtgcccggtggctcacggttcagaccgatatatgtagacttggaaaaactaaatacagagtaaatcacatacaacagtctggctttttgtaaagaaaatgcaaagggacacttcttcactgtgaaagaaaaaaaaaacaccactgaatatccggattaacactggttcagttcagttcagtcactcagttgtgaccccatggaccacagcacgccaggcctccctgttcatcaccaattcctggagcttgctcaaactcatgtccatcgaattggtgatgccatccaattatctcgtcctctgtcgtccccttctcctcctgccttcaatctttcccagcatcagggtcttttccagtgagtcagctcttcacatcaggtggccaaagtattggagcttcagcttcagcatcagtccttccaatgaatattcaggactgatttcaggattaacactaactagacccaaattggaaaagaccctgatgttgggaaagattgaaggcaggacaagagggcggtaaaagatgagatggttggatggcatcactaactcaacgaacatgaacttgcgcaaactctgggagagagtgtaggacagaggagcctggcgtgctgcagtgcacaggggtcgcagggtcggacacgagttagtgagtgaacagcagcaggcctgagttagttacactgctcaaaaaattcttgcagaacttaaccctacgaagacacacagctctctacttgctcatgaaactgtatctgcaggaaatgaaagacgcagaactcatcctaggaggaaactgatgttgagcgtttcgctttcagagggccagagaaactgcagctgacttgggagtcacccacatttcacaagctgcggagtgtccaatgtggtcactttctgagtggccagaacacttcaggagattgaagaacagaaagtggcactgaattgggggtgactgttcccaagaccagcagcttccatccctaacagtgaatcctcctgactttcaggcagaggctgctgttggccctgtttcatagatgtgagcctgggtggccgagcctggtgacatcgagcaatcgagggccagggcccccactcccagcctcccccaggatggccggctccctgtaaggagttgtgatgggtgtgtgccccacagttaaactaccagtggaggaagggccctctgtacggtacccagggcctgcaggatgttctggagtttttgcctggggagagaaggggataatccctctctaatgccgggatagtcagcaagaccagcaacaccactctcaatgaaaattcacaacagggtgccaaactccaacacaccgtgcccaggaacaaccaaaaaccacggttaaaagaaatcaacaaggaaactcgcttctctctgtgagactcaatttacttggccattttcccacggacattcaattaaaaccaactgtgggaaaagaggatcgtggtcagaaggctgcagagcccatcgaggcaatgaagaaagtgtttcttgtaacagctggagaagcccttcagcgtttgcattcgacacgagcaagcggatcgtcaggagctctaagagggggctgtaccgtcaccgtcaatcagactcgacttcaataaacagctctgatacaacaccaaacacaagtgaccaaagaaaacaacctcatcagaatcaaaaccctttgtgcctctaaggacaccagtcagaatatgaaaaagcaacccgcagaaaagggacggaacgcttgcaaatcatttatctgacaaatgaattgcaggtagaatatacgaagaactcttacttctcaacagcaaaaaggcaaatagcccaacttaaaaaaaaaaaaaaaggcagaggactgaaacagacatttctccaaagaggctctacaagcggccaataagctcacgaaaccactgagcatcattagtcgtcagggaaactcagatcagaactacagtgggcaccacctaacacctgctaggaaggctgcagtcagaaggtcaggcaagagccagtgctggtgacggtgtggagaaaccagaggcctcacacatggctggcaggaacggaaggtggtggagatcactgtgacggtctcccaaacaggtaacaaggttaccacctgatcaagcaattccactcctaggcatgtcccacgacagctgagaacaaataccccacaaaaacctggacaagcacgccccgtacctggagcaacgggaaaggggtgggaagtgacacaggctccagcgtggggacctggaactcgctgatgctggaagccggacacagaaagaccacccactgctactccacggaaagaaaggccagcacagacacctgggtagaggtgcccggggctgcccaggggttgggcgcaagtggcgggaatgctaacaggcagaggatctaacacgaccggactgacagctgcacagcccgaggatacactgacagccccgtgagctcagctcaacaaagctgaggccgaacaccaggaagtcaaggtcctcgctccatccctgctgatgacaaggcaaaaagcgcctcccttgatctttctgccctgggagcccttcccctttgtcaaggttcacgcagaggcccggaaccccacgccacatgggcactggggggagaagctggcccctgggctccacgctgcccatcacagagcctgcagccgttgcgtccctgcctccaaaagggagccctgagctgccagtgacacgctgcaggcaccaccgagcacaagcaatgaagtcccacctggggacacccgacaggccaggacaaccagccagtttcttcaacaaatacactgtgaggaaagagaccgcgtgtggaccccagttagcacctattggaaaaacacccaggggaaaaaatcttttaagataatcaaggattttaaaaagtgactttcgatggcctttaagcatcagtgtttcacgtgggataatggtatggtgaccacaggtcaccataaaaagtcctgatctctgaggacagacgtatgacagccagggccaggcagaggggccacgggcgagcaggccttggagggggtctggaggccatggggcagccacctggtcacttggggtttcgttctacctttgtagacgctggagagtttatgtaacagaaaacagaaggacgcccaacagaagggctggacctggagttggcagctactctgctgcttcctggccgatgctgacgggctgctggaggctgctcagaagcaaacttgggctccgggtctggaccagtcacactctctaagctggtccagagagaaacttccaaagacaagccttcgggggcacccacattccttgccttccctggagcacgcttctggtcacggccgaagcaggcagaaccgggtaagccaggcacgcctgggcccaccaccctctgaggtcagagcaggatgtgctggtggtgatgccaggcagcggggcagggtcggtgctcccagacgcggctagagctgggagcggccgggaacgtggacgtcagctacggtctaaaggacgagagcaataccagtaacctttacactcaaaatgagaacctcatgcgcctgcttcagacagaactaactgagccaaaccaggaaaccagcggtgccccggcctggcctcagccggcccctggctgggggggcttccttgtgggcagagggcacagctgccaggcagtgcacgggggcagaacgtccacccaggcctgctggacaaggctcagcactcctggggtggcacggtgggggctccggtcgcccgtggtcccacaggctcccagggccatggggaccgtcccctccgccgggtgcggatgggcagggagcggccgtagcccctcctttttaaaagttttgttttctgttggagcgcagctgatttgcagcatcgtgctcctttcaggggacagcagagcaatccagtcatacacacgacagccctttcgaattaagccgttcctacgagagatcttttcaaagagagccaacttccgacatgattttccctgggctgtcagcattcccagaactgtgactgtgtccgcagctgcgaggtggtggggaggggatagggaagagcagagagcgcctgggtcactgcggcggggaagggctggtgggggttggggggccgccccgggccgtcctaggccagcatccccgagcaaaacctccctggctgctgctttcttcacatgtggtttgactgacgcaaatcaagaggcaagcgggtgattcacgatggtccgggcccagggcacacgcagacggggcgggtgcaagcctgctgagtcactgggaaatgtccccctttccaggaggcgctgccgggtcaaacttgcacgtggacgcatgcactcagccgccgagagtgtgatggtgaggccgggcacagcacccagggaggatcgcagggcagatgcagggaggcgtgcaacggggcagcctccagaagcctgggccggccctgctgcgcgtgtgcgcaagtgcagggcactccaggccgggggcaatgggccctcttacaccagctccctggtctgacttctcagcaccaccactccccccgggggggtgaggaggtgaggggagggtgaggaggcaagatgggaagccaggatcctgccttccaggaggctcagtggtaaagaatctgcctgccgtgcaggagatgcaggagatgagggttcgatccctgggtcaggaagatcccctggaggaggaaatggcaaccagagcgagtatccttgcctagaaaatcccatggacagaggagcctggagggttacagtccatgcagtcacagagagtcagacacaactgagcaactaagccaccactcctggggaggtgaaaagagggtgccccagaaactcagtgccaagtgccccctcgaggggctgtgtgaggggcacgggggacgcagccccgggtcttgcctcggttgggggtgtcccagaggagctgaggcttgaggagggagccggagcctggcaggtgacgggtgggcagcctgctttcgggcagagagggaagcaggggcaggaggctcagagggggggatgggaggcccacaaggggacggggctgggggaccgctcgcaggcatgggggtgccctcctccaggggtggggagaaccagagaaggacccgacacaggaaacacccagcccaatgatgctgggaagaccatgctggcaacaaggacacggccctgaccgtgggcagacggagccggtcccaccgagaaggggaggcctgacccccagcaccgagggggtcctggcggggagcagacaacatacaaaatgcctgtgagccaggcgtctgtgctgctgacgggtctacccgccccctcgtgcccccttccagggcagggccgtcagaccgcagctccgctcaccggaccaggtgggacaggtgccctgggggtcggcaggttccccctgcgccgccctcgcgggggccctcacggacccccagccggcctggacaggctcctagggccatgggcgagtcagtcgctcactcctgtccgactctgtgcaccctgatggaccgcggcccgccaggctcctctgtccctgggattctccaggcgagaacactggagtggggtgccgcgtccttctccagggccccgggagcctcccccagagctggtcaggaacgcagggggaggtgggagctgctggctccgtgcacgcggcccggcgagcggtctgagcagccaggcccggggaggacagagcaggcgggggctgccgccatcgtcactctcggatctctttcacagaacgcccccaaagaccccaaccccaccccaaccccttcgcaaacacccagatgcacccctcaccgggcgctggggacacgtccaggagtcgggtgcctcccaggctgtctgcctccacggacgccctgggatgcacccggccctggcctggaaggcattctgagactgtctccttcctcgctgtcggcctgtgggagcaggccgggcagcccctcgccgggcacagcgggggccacacgcttgcggaggaggaacagaagccgccacagcggcttccttggcgtggctggggggtggggggcggccgctgacggccagttcctctcgcttcccccggaggacggcacagccgtttctttcccatttcctgtgtcttacttcacaggggtgggaccaaggctgggaggggaggtgggcggtgggggcgcagggtggggccgggcgcgggtgggggcataggggcactccctccagggcacgggcaggcctagcagagacgctgacatctccagcacaatcgcgacccaccttgagcccgccacacacccaaagacaagtttctcaacgtccttgatgaaattttaggaaacagtccaaagcagagacttctgtttctggggtgcttctgcatgctaccgggcctgtctgggcaccttaaaagccgcccccaccccccggccccaggccccccactcccaccaacacttggcctacagactgaaggccggttggttctcctacagcggggccacctgccccagacggtctgcggtgactccaagagcccaggttctccgggctgggagatacatcagacaactcttctccccaagacgtggtgccacccgcgccccggctccccaccggccaggcccacctggaggctgcggggctcctgagaaacggtgtgtgctcaccacgggcttcagaccatcacatcttcaaatgggaagaaagaaacacagacccacaagagaggggcagggcccagcaacggtgtggcccagttatctctgagggagctcccgcagagagggggtgtccccaaaaaagagatgcctctgctaccagaagcattgtagaaatactgaccatctcacttgcaaagaaaaaaagtactccagtgcagtgacgtgtctggaccttgtgtcccaataacatgccaggcttgctgcaacctgcctcctcagacagtcctaggcctctctgcaaagccggcttccctgcctgtagatgcacacgcagcatcctttctctttaaccagagaaggccatcgtcaggggtcactgcaggcgccagatgggaagggcaggacaggtgcaaggcggggaggtgcccagggcagcctcagcacagcagcagccccccagggcctcctccagaccccagggcacaggtctccggacactttcactcgaaaccagcctttacctgcaaaaacgaagtcatgatttgcagtccttcttcgagacccaggcctgagatttgtgcccgcggaggtgatgaagacacagagcaactgactgattattagtgatccagggaacagactgtctacactgcaccaaggtacacgtttatactcacacccgccccaaagccttaggataaacgtgaactggctctcattatgcccatcttacagattagggaagtcgaggctgtaagaaactagatatgcacctgctatctaaacagcaaagctggggttcggtcctggtcttgtgactccaaagccagtcctggcagagcctggagaccctccccacatggagcacagacggcgctggtccagccaaaggctgggagaggcaggcggtgggggagtgagcctcaaacagaaacagcagcagcggtgaagccgcgcccccgccaacggaggcctccggggagcagggggccctggggcccgaaaccgcccgggctgcgtggagagacaggggagcagggaacggaatgcgcgtcccccctcggggcagacgcgctccgggctgcgcagagccggccgcccgagtgcccggaaggcggcctccagggagagagggcgcgtgccggccgggcgccaggccgctccatgccttctgcaggacggctgacaagtgtctcgctgaggccaagagccgtgagattctgcgtttcccttcccgtgccccagagtccctggagatggtttccacgtggggagggcgcagtccctgcttgcgagtgtctccttgttataggaacccagagaggggaagactctgaaaccccccccgcctagagcacctcgtctccaagagctctgggattccaggcttgtcagcggcttgaacggtgatcaaaggtctgacacacctgagacacgcccggctctgctttgtcagccctggaagacgtgttggtcatctggaaattcttccttcatattctcccgtttgtaatcccgccaacggcctcgaggcagggacagaggcagaggtcagcgtgccgtgtccctctgcgacactcagccaagggaagccagcctcggacccaaacacttttgccccaagtccccccaggggtgtggagcagcacagagctgcttctgggcatggcctgggtgcgatgaccgagtccagcccgctgcctgccccccaccagccccgactcagcaccagctcacagcagcgcagacggtgggaggagaccaccctgcgaggggtcgcacacggcccttccgccgggacccggagcccctgctgacccagagacaccccccaaggtgcccactgttatcagtgcctacagagtcctgcacgtctcgtccctgtgtgcatctgtgcacatgtacgtgtgtgtgtgtgtgtgtctctctttagttactaagtcatgtccgactcttgggaccccatagactgtagcccaccaggctcctctgtccaggagattctccaggcaagaacagtggagtgggtagcctttctcttctccagcggatcctcccggcccaggaaatgatccggggtctcctgcattgcaggcggattctttaccagctgagctcccagggacacagcattagtgaggagtgaaccagcagtgacatgccatcgctaactgaagcctgtactttgctcaggttcctctgtttccccccaacaccctcctgccgtccgaggaccctacccaggacttcaagtgacgttcagtcctcacgtcccccaaggtcccaggacgctccttgttgctggcggccttggcattgaggaggatgagtcaggtggtctgggagtcccttggtggggatggcctggatggggggctgtgtgctcagcaggaagaccgtggagctgagtgccttctcctgccatcacaccacgggtggatccgatcatggtgacagaatgtaactaaaaatgctgagcgtgaatgcgcagcacactactccaaggacacgtgtgacttcccacggaaggagggatgagaaggcatgagcggtccacccaaccccagaaatgaaagaaagaacacagacagcgcccagagcaaggaggaggaggacaagaaaccctaaaccttgcgctcaccaacagctaagcccatcgaccatcaaaacctggttcctgaaaattaaagaaagattactcagaaagagggatatgggcgcataactacaaatccagcagagattcaaaacaataagaaaatatcactgaaaaactccattgctaccaaagtgaaaatttagatgaaatggacaaatggtttaaaaaaaaaaaagtatcttaacgttatagggcttcctggtggctcggacagtaaagaatccacctcaatacaggagacccggattcagtgcctgagtcaagaagaccccgtggagaagggaacggtttccggtattcttgcctggagaattccatggacagaggagcctggtgggctacagtccattgggtcacaaagagtcggacacgactgagcgacttcactttccacacataaatataacctaaaatgtgcaaggtctgtatggagaaaattatgaaaaatctattaaaagatctaatcaatgaaaaagcaagcaaacaaagaaaagggaagatgtgatacagatgccagttctccccagaatcatccgtgtgttcaaagcaattccaatcaaatttccaattcagttttttagaggaacatgtccagtgagctccatctgtggggtcaggcccaggggcgctgggacccttggagaagagggacagagcagggaggcgtgggatagctcgtgatcaagaaaatggaaccgacccctgccttgcaccacccacagcaatcaaagacttccttgtgagagacaaaacggacagtcacaggagggactgaagttccctcttggtacagttctgcgggttttggcacatgcgtaatgtcatgtgtctgtcattatagaatcacataaaatgattatgcatcagtattggttcccgggggcattcctggtagctcagatggtagaaaatctgcctataactcaggaaacctgagttcgacccctgggtgagaagatcccctggagaaggaaatggcaacccactccagcattcctgcctggagaatcccatggacggaggagcccagtgggcctagggtcacagagtccgagtcggcacgcacacattggttcctgatgctgggaaagattgaggacaagaggcgaagggggccacagaggatgagatgattggatggcatcaccgactcaatggacatgagtttgagcaagctccagcagatggtgaaggacaggggaaccatccacggggtcgcagagctggacgcgactgagcaactgaacaacgacgacaaacgtgccatagtgacgcaagatgttaatgacggaagaacgagtgccagggagcgggtatatggggattctttgtcacgtttcaattttcccataaagctaaaagtgttccaaaaacccaaagtctaatgagttttaaaaatggccaaaatggtaaattttatgttgtgtatattttatcgcaattttaaataagaaaattcactgtcaggagaaagaagttacagaagggaactatccaacatgacctccatgaccttgaggtttggcaggttttctttaccctgtttttaataagcattaactacaaaaggaaaggctctttttggcatggacaagtcgtaattttggaggaacaatttttgcatgccacttgtttgtgtttcgaacagtatgaaatagtatgaaaggcaaaaagatatggcaatgaaaggtgaactccccaggtcagtaggtgccaaatatgctactggagaagggtggagaaataacttcagaaagaatgaagagacggaaccaaagcaaaaccaatgcccagctgtggatgtgactggtggaagtaaagtccgatgccataaagaacaatattgcacaggagcttggaatgttaggtccatgaatcaaggtaaattggaagtggtcaaacaggagatggcaagagtgaacatcaacatgctcactaagcctccagtgaatcccaaccatgtgcccaggaccgtgcttcagaaaataaaaggacgagtacaattcgaggcaaggagccccagcagcagcgaggcagtcacccccggtgaggaggagcaaggctgtgagctgggccctgacttcgcccgctggacacgggaacccacaggacctggagcgactccccaagaccaccagcccgatacaggccgggggctggccgccccaggtggctctgcctggcctctaaagacacccctccatacactcggtctccctgctcccaacaccccgtggggatgcaaaagagtcagagaggactgagcgactaaacggcaacagcaaagtgaacagggctccgtcagccgcagagaagcgtggcgctttctactcagagcgccccaaagagaagaagctacctggagttaagagtacaagttctcactccaaacacaggcttcaccaacagaaagtctctgtttaaaatcttgcatgtgtcaacgactaaatttaatttgctatttcttttccaagtgtaagctaacattttccaaatgatcagacttcctcatacccacttccctaccttctgagtcaactttgagaccataacacggtaaggctatgggacgcccagcagcacagacgcaagacacagaagatccacgagcagcccatctcacctgctgaagggcaggagggggtgaaaccgatgacctagagatgtccccccggagggtatggagggacaaggacagaggacacagagcagtggtctgcagagcaggcaggaggagctgcagccagggagggccaccggcgtgcacacacaggcacacaggcgcacatgtgcacacacagacacacaggcacacacaggtgcacatgtgcacacacagacacacacgtgcacacacagacacacagatgcacacacgtgcgcacacaggcgcacgggtgcccacgtgcgcacacagacacacacgtgcacacaggcacacacaggcgcacacacagacacacatgcatacacaggcgcacgggcacacacaggcgcacacgtgcacacacagacgcacacgtgcacacacagacgcacacgtgcacacacaggtgcacgggcaaacacaggtgcacacacagacacgtgcacacacaggcgcatgggcacacacagacgcacatgcacacacaggcacacgggcacacacaggcgcacacggacacacacagacacacgtgcacacacaggcacacgggcacacacaggcacacggcacacacagacgcacacgtgcacatacagacgcacatgtgcacacaagggcgcacgggcacacacaggtgcacacacagacacatgtgcacacacaggcacacgggcacacataggcgcacacacagacacatgcacaagacacatgtaggcacacacacaactgcgtcagccatcacaccgtttctgcacagccactgggaagggcggggggaagggccacatcattcaccagcgattactcatcacacagggagcactggggttgggttttcttctccttcaaggcttttatccagtaaggactgatgaaaacaggggaaaaagcacctcagaagccaagcctacatctggtggtgccacacaggacaccgctgaccccacgttctaacggctcttccaaaaaaaaaaaaacaaaccccaagagaactgtcccaggccccgctggacacgatccttaccatgaagcctattccaagaaggttttaggtcatcgccgcctaccagcactggcctgagctggccaaggccaagtgcagggccgggggccagccgcgctggccagggcacaggcccgaacagctgtgacagcgacgaggcctgccgaaaatagccgcctgtttgtttatgtcgcctgtgttgcaaggcagcctcgtggccctctgtcggggtttgctgggctgaggggtctgcgggaacacgcagccggcagtagggacttgcggagcatccgtggagcaggaggctcgctcgggaaatgcctggattcgaccgctggcttctggaacccgggctccggggccccagcatgcaggaaggccccggcgggcccgaagccagcctgccgctgagacctcacaaatgaaaacagctttagaggacaacctgcaattaacatgggaacaattatcttcctaatttaggttaatttctacttcgcagcccgggttggcaggttgagggggggccagccctggagacatctatgtgggtgcttttttgctttgttctcccaagtccacacattttaaatatcgtcaggaaggtttcaaacatccacccgcaccttggagaaaagggcctaggtgctccagagagtgggttccactctgggtgccagctggctgccctgcatgaggatggaagccttgatcagaggcgttcccagggcactactcagtgcctgcagcacccagaggctctctgagcagaaagctgtctctgggccgggcccaggctggaaggcgggctggggctgggacacaggtgctggggaggctgtgagccagcaggccctggggtctaagagcaccagcagagcctttcccaggacacccttgcagacggcccggcagcgcagcaacgtcacagcccggctgggcccagggccccccggagccccgccggccacgcagtaaacctggggctctggcggctcccctggctgagaacataaacccttccagtgtttattgtttgttcgaggcgtgacgccaaggctgccgaacacctgggtgcggacggcagtggagggtgagcacgccaatgacgggcagagggagggggcgctgggccaaggcactgctggaccaggtgtcccggccctggacacagccgctggctgtggcagggcctggaagacacagggcatcatcccccaaccccgacgttatttaaaatgtttaacttcagttgcagaagagcaaaggacaggatcctacctggacattaaagagcaggctactcaaaaaccatgtgtcactctggaccacgcgggttttccactcactggtagcagtgagttggtcgggggggcagatagggaaaatacaggttccagttttttctttctgcacttgcagtaggagaagctcccaagagccaggagatgtttccgggggatgtgggatggacggccccctttaaaagtcagcctgttagcactcgaagcagagcgcatgcaggaccctgggtgggaaatgaactttccacgttagttaccgtccaaacaacaaatgggaagccccattagatgtgcttttacctttaaaagtaaaagtaataataaggagctacacacccatccagaaatgaggcagggctgcccaccaggcaggcttcccgggaagcggctccgggtccctgccagccggccctggggacagcgcccctcttgctgccaccttctgctcagttgcccctcagactcgtcctccctggaggaccaggagcaggctgctcaaacagcgggctgcagcaggccctttaaggactctgttgggttcagacgctcgacctggtcccctgccagcttttcaggtgagtgtaaacatcttgtaagatccggggtcccagaaaaccccatcttagaagagccgccctgcagtccaggcggagaggaacccgccaggggagcacagacagggccccagctggcaggcctgcaatgcaggggtcccagagccctcagacgtggggaccctggcactgctgaagcagcggaccccgcctctgcacctataggagcccggacctgagcaccgcggaggcaggggaccacggagaggaccggggtccagacaggcccgtggaagctgccagggccaccaggctgtgcccaaggtccggggagaccccctccaccagggctcagggagcactgggcgtgcctccccggcccccgcccggccacccttccgcctagcaaccctggcacttagcctgtgaggctaacaggtctacatgggcagcacgagcaccctgaaggcaggcacgctggccccgtgcttcctcggacctcagcgagaaaacaccgaactacacgctctcactaagcacctctggggcccagtcagctaaaggcaacagagcgaaatcaagtcatccaagtgctgcagcgagaggggacgcaagtttctaggaagtgctgggccgtttcaccggtcaccccgcccgcccccctccccgccaccgtctgccgcacacagagcaggcccctctcgtgagcaggggcctgtccatgcgcccatcaggccaggctctcggggtgagctgtcatgtccgtggtgggggaacaacggcgggaacagttgggcacacacagccctgtccccaggcccccagaatccacggcgggcgaggctcaggccagggcacatggcggcacacagaagggcctgggggtgaggtgggggctgggggggaaccccgctccagcctcggctcctccgcatctccctcgcggtcaccgtgggtgtccctgctcaggcctggtgacaccggacagcaggcagaaggggtctgttcctgttcgcattccacaggccatctgcagaccgcccatgcccagcggcaagggacgcgccaggccagctcaggacgacgcccgccagcaccgctctggaggccagccatcatggagggtcccctggccctgatacgggtgatgacggcaaccgtccgtgtgggggcaagctagcaaacctcacggtcacccagaagctggcctggaaataccagacacagggaggacgcgagggaaggggctgcaagggccatcccccgtggttgcagcgccgacccccgtgatctggtgaggaggggacaggaggcacccgcttttacactcttaaaaatgtcccgcaataaacagttcccatctttacaaccgaagaaagacaaagcacccttgcttcttcaaagagagtgctcttgctgtaattaccgtataatctctcacttcctctcatgcttgaacttccctaaagctttctgttttgcgtccagttgactgttcccgttgagcttcatttaatttcttaagtaagatgtcctcgcccaaaccaccgacgatcttctccaagaatagaccggaggggcagcgacctgtatcccaaaccaggtgggagcatctcgagaagggagagccctgggacctacatgctaagacacttccctgctcggccacacactcgcgcttcacttgcagcggcttctgacggggccctgggtccaacccggccctggagtcgggggcagggatgtggagctcacaagcggggactccgatctctgaggacgtgagcacccactctacggatgaccccactgaggcccagagggtcagtgggaggaaaggacagcacccttgcaggagcctcagcagggcggggaccagcaccgccccgggccctccactggcgtggacagaaaggaagcacacgtgcagcacacacgccacacacacacgggcacatatggcacgcgcacacacggcacgcgcaggcgcgagaggccttcatcccgagccccggagcacagcccccgcaccgaggccacacaggcccggccggccccgccgccacctccagtgctgcggcccgcagctttctcctggtcccgctggttgctgtctgtattttccatgcagacagccggctgcactgagcactaacactcagcctctaaaggtcaccgtctttcctggggcctcagcttccctgcagggcttcctgcggtcagggccaccgtgctggctggcatttaagagaaccttcactgctttttttttttttttttttggacttagcatttatctgataatttctgactctccttcttgaacatcagtcattaaatcagaaacctaggcaagactccccgaccgcctggggatagtggactgggtgttggtcacacacagccccagctctgtggggctgagggggcgcccaagggttggggctctgcacctgagcagagggcgctggcggaaacgtttagaaaacgctggattgattgacggtgaaacctgctcatcaggcctgtatgaatcagatggtcttggaactatttgctttaattttccttgacattcaatatttgattattcttgccaaagaaatgacacagtgatctcgatggcttccaaaagatgttccctggggcgcaggaaaaaaaataacaaaacgttcatttctgtttatttttgtatttaaaaaacggaattagttttctgctacttaatataaaggctgggctgtgctctaacccggaggggggaggaccccccgccccagggcaggaacatcagacggtcctgtgagcccaggtcccctcctggcctggaccccctcccagcctgggttcccctcccggcctgctccctgacccagccaggctcttagctctgcagggagtaagtgggggtcagaatgagtagccaggcagcatctacacttcccacgagggtgtgcactttccccaatatgggggaccaggggcacccacactccacggatgcagggtctgctcagaggacgggccttggaagagggacccccgccttctcaggggctgtgcctggcagccctgcccttcgggaagccacaaaccagcctgcctgatgccatgagctcagcacaggtgctcggggaccagggctcagggtgggcaccccattctgagctcgggcgcagcagggtcatggcctgcagaggagaacattcagcctttacatgtgtgtctggtgcactgagctcatggtttcacatatggggcagcccagggcagagacagagactctgagccgaggttcagaccagtggtcagtttttgtgaccgcaagcctgtgtccacggcccctctacccagaggacagcacgtcctcaggagccctcttcactgctccagcctcatgagctgatgaagctccatggggagcaggccacgccagcatcccctaggcccgccctgcagaaaccccgctgcccgtggagatgccagccactgcagctccaggcctccctgctgaggcccaccggactctctgacacaccaggctgcctgacctcagacacagggagagactttcagaaggctgcgttcacccccagaatcctggagcaaactgaggccaagcgagtgacagctcattctcaacgcagctgggtcgaaggtctcctaaccgcagggcggtcgcccccattatgcccactgccgctgtgcccacgtctgcccacagcaccgtgggcacgagaagatgcccatgagggacagaggttgaaggaaacacaggagagagacccacgcggcccgggcgtgcgagtctgctgaggccagcacaggtgagcgcacgcgcagcaccccctcagggtcaaaagaaaacgccggagactaaaccacgaaccagagacgccgggagggcagtgagctcggggcgtccagaggcagccaggccgggaccgcgtccaggctctgggactgggtttggctggcccccgggcgagtggcggctggcagcccacccgggcatcacgagggagcaggctgacgcttccagaacctgactcacagccggaatcacaaacaccgcggccctcgcctctcaggggacaccctagggctcttcagctcaagtgtgcacacccttaacccccagggctgaggtccctttgttgccattgtcactcgagcaggcgagtccccgggtgggacgcactttgcaggagattcctcactgtcttcacagccgtcctcctgctgaagtctgcttcatctaattgccagccggcagcccgggcctgggcgacagagacagacatctgaccacgtccacagccccgaaaccagagcccagcttaggcaaccagagcccggcgacgcacatgcaacacacttcacttgcaggagctgggacacgcaccgccgaggaatacaaccctaggaccattttcacgcaaccatgaggccctctcatagacttaaccgtgtcatgcagcagacaaccggggaaggcaatgcactcttgcctggaaaatcccatgggcagaagagcctggtgggctgcagtccatggggttgctaagagtcagacacgaccgagcgacttccctttcacttttcactttcatgcattggagaaggaaacggcaacccactccagtgttcttgcctggagaatcccagggacacgggagcctggtgggctgccgtctatggggttgcacagagtcggacacgactgaagcaacttagcagcagcagcagtggacaacattattcccttacatacacccgagtcgggaaaaccccctcctttgtcacgtatttaaaagttgggactggctggcagcctgccaccagagaagagtccccacagtcaacacaccgacggtctgatctcttttttcctttaggaagggcggctgcaccgagcacagctgctttggacagaggcctcgcacggagcgcagagggctggaagtgatctcagcaccttaaggaactctgtgcgtgggccgggcgtacgcagacgctccggcatcagaaacgaggggcagcgggcggggttggggcctccggccacacgcgcgcagccgagggacacccgcacgtcttcggccgcaccgacgcctcacaggctggtggccggcggtcacttacgggccgaggaactgccgaccgtccacacagccgcagcagacgcctccccgcgtgagaagggcccgggctgggcccacggagcggctctgcctccactggccgtggctcctgcgggctcgctggctccggcccgagaaggcccatctggacgccgtctgcctgcgcgtccggcgtcccgccctgctcccgctgtaacccgagagggccgcagcggacgggccggtgacaggacacagctgagacgcggcggacgggggcgggggaggcgccgcggccccaggacttctccccggtcctccagcgacccccgcttccgtcacaccgctggggccagatggccggggctcagcaagtcccctgcccgccctcctaatggccgtgagaagagtgccctactcccggggctcccctggtcgtccaggggttatgactgagtgctcccagtgcacggggcgcgagttcagtccccggtcagggatcgggatctcgcctaccacagctaatacccagcgcggcaggatcatttaaagagcgccccatccccacacaagccccctcctttttcatcctcatcaggaaactcgaaaggagtcagcggggtattttccaatagctggagaaagccctcagcctggagccctgctcacagctggggtgtgggagccacgagccacctgtgaactaaccctgaaatcaattaaaaggaaaatgaaaacttggctcctcggttgcaccggccacacggaagtgctggacggccacacgcggtaggtggtctccacggtgagctgagacctccccgccccgacgtggacggcctggattggaggccgggggggagggctcctcttcactaagcatcgctctatcagtgtccttcctcttcttacaggtgagcagggaaaacgccctcttaagtagacgcgactctctgctgcacacgtggattaatctgaccgagtttgcgtgcctaatgggcgtgagaacccggaagtgcagccagcccaccgtcggcgcgcggtctccgggacccttccgcgcggccctccccttccgccccggccacgatctacgcctcacgtcacccctctgctccgagctgctccaggacccgctttcccgggcgaggggctccccaccccgaccccgaccccgggggtccccccacacgggaccacccctccagggccgccctgtcccttccccgccccctgcagggccagacgcccgcacctgagccgccgccccgcggtggtggtggggggctgtgtccacaggctgtgaacaccagccggaggccccctggtgaaagaaggcccccctccccgcgcccgcatcctgacaagtcagcctccgtcccggccactaacaggagcagctgtgggcttctcactcctgcaggacgtccccctcgcctgtgtgtgcccccagagggactgtcctcctcctgctcaagtccgcaagagcgggagaggccacgctgggctctccacaccggcccacacgtctcagtcctgctggcgcttcatccatttgcttctctacaaaaaacacgcgagcggaagaccgagacatcgccaaggggccgctgctggtgaggctgctgagcagagcgtctgatcagggctcgctcgtcgtgcaggggccagggtgaccccagcacccgagagacaacacccactcttccccagggtggcctgccgtgagtttagcacgtgaagactggtgccccacgccgggcaacagggccagagaggcctgggagggcacccagacgcccaggcaatgggggggaccccaccttcgtgtgggggacgctggccaggcctgtcaccccacgcccagccctggcctggggactagagcaaagacaggtgtgcggtggtctaaggactgggctcccaggaagcccttagggcttgacgatttgaaggaattctttctttttatctactctagcgtgtttatttttgtctttctgtagtgcctgcttaaaattccacttcctctcctcaagacctgtcctctgtaaagggaaatatttcccactcttttgcaatcacccccaaaggtctctggtgtggcctgccccgaggtggaggctggcccgtcctgagcacagcggccgagcctcgggggccaggtctgtttctgtttatctcccagctgttttgctttgttctcttcttgaaatcacttgtcatcatagagttttcagccttttttttttctttttaagctcacagttgagaaaaccaacccatcaagtgaaagtgtccaggtgggccggaacgccgtgtcatcggtaaaaacagctcatctgtaaactgcgtcccacagcgacctgaggcctcgttccttactcctaacaaaagttctcgccgccacatgtcctgcatagacgcgagccctgtgctcactcagtctcctgggaggcccctgccctggtgtccccggcacagtccagcatcagggcctcgctcccttctccactgcctccgaggcctcccaggttctccctgacctgtctcgccttgcccccccgccttgctgagcacccatggagggcacagcccagcactgggaccgaatggcctgtaccccagcctggctgccctggcagcgaccactgacctcagccaggtctacctgagtggaccccaggcgtgaacaggattggcacaggacggggagcacagcccaggattggagcacagcacagggtagatgaggagcacagcccaagatggggagcacggcagcaggagccggggaggcccttgctccacccagcgggagcccacaagcccagcccctggagcaggaatcttctcacctcctatgaggatcacatgcgctaagccgtgtaaactggtcgtgagcatgaagtgatactggatggcagcctggtgtcactttcattattaacagtttgaaaaagcagattaacgcgcaccaggcctggcttaactctcttggggctcccgcgaggctcagatgggataacagaacacacaggagaacatcctaaacactcggggtgaattaactgcccaagtcctctaaacgccttgccccttccagaggctgtgttagaagaggagctggcccaggagcgtttcccccttgccaggctcctgtgctgaggcccccacagtcaagagccccagggttgctccccgtgttcgtggacagcggggtaactgttttctaaactgtttgatgaggattaggaaggacagtgagagcctctaccctcagaggaacaggattcaaaaaacaaaaaaagccctataaaaatgcaaatgacttggagccaaagtcttcagggtgagccccttccctctagcctagcaaagggcatttggagcggttggctggggacatgtagagggtaggacctggcctgcaggccccggtcttagcaagacctgccggtggggcagacacacccactgcctcgagggcacatgctgaaggcagttagggctccttcctgcaagtgtagacaacgcaccctcaggcacttcagtcctgtctaacgagcagccccatggtctgtaacccgctaggttcctctgtccatgcagttctccatgcaagaacactgacgtgggttgtcatgccctcctccaggggatcttcctgacccagggatcaaacccttgtctcttacgtctcttgcattggccggtgggttcttcaccactagtgattaaatccatctaagtggcacaaatgtagtcacgttcatctgactgcttctgccatgttctgtaactgtaaggacagtaacctagtggtcagtgctcacacccactgcaggtgctgggtttaaggtgagggcagacacatgggcaggtgatgcaggagtcgggctatctttgtctataacactttctgcatgaactattttcgaaaaagtattccaaaatgaattctagaagtttacagatttgtaggcagggtaaataaaaactttgtttggctttcaataatgttcaaattattgcacatgtgcagcttcgcttcacttagtgattaaattacagccatccctagaccaatgggtctcttgggacagtcaaagctggggtctttccagtagtcatgtatggatgtgagagctggaccataaagaaggctgagcaccaaagaattgatgctttcaaactgtggtgttggagaagactcttgagagccctttggactgcaagaagatcaaaccaagaagatcgccccagtcaaaccagtcaatcctaaaggaaatcaaccctgaatgttcattggaaggactgatactgaagctgaagctccgatactttggccacctgatgcaaagagctgactcactggaaaagaccctgatgctgggaaagattgaaggcaggagaaggggaagacagaggatgagatggttggatggcatcattgactcaaaggacatgagtttgagcaagctccaggagatggtgatggacagggaggcttggtgtgctgcagtccacggtgtcacaaagagttgcacacagcaactgaacaatgacagaccaatggaacaatcaagcctgtatttcgagtgtaaatacacacacacacacacacatacacacacttttgagtttgtacaggtgaatcttcagcaaacacttccacctccctttatctggaggcttttgaggacacagtggtcactgccctcacaggccatgaagctggacagcagcaggctgagccttcgagcagccgggacacagaagcaagcagatgaatggactcctgtgggtgagctcactcgatggtgatcccacagcggggattattcccggtgccctgggcagtctggcctaatgtgtaagtattgaaacgatgctttggggactcaagatctaagaatctggcagaccagtcagtctcgctcctagaaactgaagatgagtgtggggtcacaggcaccccagctctccccccaggaagtcactgttctgaaccaatccctggtctccactggttttgctctcgtttcccaccccttcatgcactgtggttaggcttgcagtgactcccagggtccactggtcagatgtgagctgctaacccgggccctgaggtcagtggtgatgacccaggagctgacttccacgatggcaccaggacctgagaggtgacctggctgggctctttgcttgctgagtgtcaagctgagtgccaaggcccaacagcctccctgacccctgctccaagcctgcaggctccttcctgagtaaacacacgtctggggcccacacttggcctatcagtgcagaggcggctctgaacacaccccagcttcacagccttcatgactgcttgtgaagtgcacattggaaaacacactcttcaaacaagccacaggacacctgctcggcgtcagggctgggcccctgccccacgagcccccaagtgctgggctgacagcaggacagcgggaccaaggccactggacacagcagagcccggccccacccccgtccggttctgaatggtgagcagggatgggggggctgtgaaagccaaggcaggacctccccacaccggacgacgactgacaacccagcctcgtgtcccaccgagccctgtgccaggcagcggctgctcacagggagaagcttctggaaaaggcttgagatgcactggatgttacaagcccagcattgagcgggcagtagcagggccgtggggctgcagggctgggggcggcccatctgtggcctccggtccacgctccaggagcaacagtgcagggcagcctccacgaccaagcggtcagctgtccctttgcaagccaggcccctgcacgctctgctctcttccagcctcaggtgcccagcagggtctgcaaacctgacaccaaggaggagaagggccctgggcgcacagcccaggtcctggaacgggctccatgccctcagccaggccgcggccaaacccaggaccctcaggggagcagagctattttagggaacgtgaaggagtcacatttagaaacaaaacaccaccgagcctgagacctagacgacagtgacctcccagtgctgtgcagcggccactgccaggacccaggcgaggggcccaggagggcaaagggccgtacagggagaccccgggaccccggtcagaaggacgcatccgcccaccacctggcagcccccgcctcgtctacagaacgcagctccacggcgccatcaccacctgcaattctaaacatgcttttctaccgtcaagggcaacacctgctcgagagaatggcttcagacgttctccttactcagagcatttcctaatgactgcatctggcctgccgaacactgccagtgggtttttccgagctctctgttagaacacgcaaaacggaataaagatgtcccagtgtctcacagcctcctcccaggacccggagtaaggagtcgctacacacagttccgcagtgtcccgctccgtcagcaccgggactccggccctcactgctgacgtccacaggtgcacggcacacaggcccagcagcagatgccagtgaggcccctcgtccagctggacgcaagtgaccgtgctgtgtccaggccctgcccgggcgggaccccgccatgggacggccggggccagcccttcactgtccctgggcctccgtttcctcatctgtgaaatggagtcctaaaagcacagaccccccttgactcaccgcggggttataccccggtaagttgagaacatggtcagtcaagcacgcacttaacaccgtgccctcctgaccatcacagcctagcctcctaccttaaaggtgctcagaacgctcaacgtcagcctacactcaggggaaaccgtcagacacgaagcccactttacagcaaggcgctggctgtctcacgagctgtcgtgagcactgagcctgaaaacagagtggctgtccgtgcatcggtcgctttctccgggatcacggggctgacgggggtgctgcactgcccggaatcacgagacggggtcggacccaccgctgacccggaaaagagcaaaaaccagcattcacagtacagcttctgttgacctcaaatgactctcacgccattgtcaagtcgaacctcccatgtcgaggaccacctgcaccttcttttatagaagtgctctgaggacggtgtaagaagctctttaacacactgagcgtagcccagcacccagaaagcactccatacgtgggcggtcactttagatatactagactgaggaccccgagaagcgtccatactcaggactaggcgccagcgtccctcggtggctctgcgggacgggccctggacaccggagcacgctgtgacctgagcggctcccggcggggctttcctactgggaaggcaacacttccgcgagcttttcaagcaggctagtgcgaagctcacagccaagaacccaggcccatttccagggagggtctccacagaaagtctggaacccatggatcactggaggatcacgttccggaaactaacagtgacaggcatcttctcatctgttagacgagggtgagaaaccaccgcctgtggccgtctgacgtttcctggaggaggcttgacggctgtgggcaagctgagttcatcacatttcacagaggcagagacctacaccccgggtgccggccagccagaggtgctcagcgaggcctccgggcggccgggaggggcctggcccggcgggaggctgccctgagccgccagagtggggccccccagtccttccgccggctgccagcagcccccacttgaccccaccaggcactccggccactccccagccccaggcccacaacctgcagtctcggcccaggcggggccccggcaggcgcacagagcccgctcacccctcgctggcctcaccgtccaagcgggccctcgggagcgagtcacgggcccccaggaccgcgagcgctgcaccacacggaggaagccccgcgcagttcccgatcgagagaggcccgcgcgtctgctccctacctcccaccaggcctccgtcctgggcctcccagggcacggggctggatcgcagcagaaaccccagtggtgccgccgtgctcgcaggcgagcggctcccggctccgccccgacatctggtttctatttcatgcccgtgttgtcacgttacataacgagcagatgagacgcagggtcaccccggactcaggctcagggctcagccagagcgctgtttacacagggccagggccaccagaccaggctcagtgccaaggacacacagcccgctgacaccccacacccggctgatctctgcacagcccggctgatgccccacatcctgaccaaaccccacacagcgggctgtcaccccacacagcccgttcacaccccacaccccggctgacccctacacagcccgctgacaccccacacagcctggctgacaccccacacaacctgctgacaccccccacaccctggctgataccccacgtcctgactgaaccccacacatcctgactgaaccccacacactctggctgacaccccatacaacctgcagacactccacaccccggctgatccttgcacatccaggctgacagcccacactgtgactgaactccacaccctgactgaaccccgcacaccctgactgacaccccacagtctgactgaaccccacaccctgacacaccatgccctgactgaaccctgtacaccctgacacctcacaccctaacaccccacaccctgactgaaccccacacaccctgactgacaccccacagtctgactgaaccccacaccctgactgacacaccacaccctgactgaaccctgtacaccctgacacctcacaccctgactaacaccccacaccctgactgaaccctgtacctgactgaacctgtaccctgtaccctgacacctcacacctcacaccctgactaataccccacaccctgactgaaccccacacaccctgactgaaccccacaccctgactgacacgccacaccctgactaaaccctgtacaccctgacacctcacaccctgactaacaccccctacactgactgaaccccgtacaccatgactgacaccccacaccctgactgaaccccacatcctaactgacacgccacgccctgactgaaccctgtacaccctgacacctcacaccccgactaacaccccacaccctgactgaacccctcacaccctaacaccccacaccctgactgaaccccacactctggctgaccccacacaccctgactgacctcataccctgacatcccacaccctgagtgaaccctgcatcctgactgaccctgtaccctgactgaaccctgcaccctgactcaccccacaccctgactgaccccgtaccctgacactccacaccctgctgacaccccacaccatgactgaaccccgcaccctgactgactccgcacaccctgactgaaccccgcatcctgacactccacaccctgctgacaccccacaccatgactgaaccccgcaccctgactcaccccacaccctgactgaccccgtaccctgacactccacaccctgctgacaccccacatcctgactgaccccgtatcctgacactccacaccctgctgacaccccacatcatgactgaaccctgcaccctgactgactccgcacaccctgactgaaccccgcacaccctggctgacacgccacacatgcagtaaacaccacgctgcctgctcgcagctcttcacttcagccgagccctgtccctaatccctccatgcgcgttcaaatgagagggacggaggagccacctgaggccacacctcggacgaggcctcagccccggcggcacgtggaggtggagcccggccaggaggggtgtctgtcggctccctggggtgcgggggagggtggagcaggggtcctggggcgcacatccccaggaggccgaggagctggctaagaaagcgcagggacgcgccccgcgggaggtgcacgctgcgatgcccggcgcgggagctccagcagctgcccactcccagcccgggcgggcctctgccccctccacccacccgagcaccaggcctggcggccgagttcaacctttcttccaagcagcgcacgccagggtcaaggccggcctgactggtagaaaacccgaacggccagtgcatctgggggccgggggccaggtcggggggagcccccggggctccgtgcgtttccatctccctggctgctccaggctccacggccagcatggggctgacgggacctcagcactccctctcctcccacggcaggggcctcggacgtggccggggaagggccactccacaggctgcgggcgcaggctggccataagacaggcactgaccgggtcctggggctggttgaggagaggccctgagccctgcgggaggcgcgggctggacgtcaccacagggctggctctctgcccaccggctccctgctcctgtgcagccttgtctgagagccccggacggggctgctggcccgagccggtggtgggcaggtctcagggaggggtgcccactgcactcctggcgtctgacctccggcttcatcccctgccggctgcgtctcaccaggaggctgagcctgggcagggccaccaggtgggcctcggggcaaaggcgacagacagtcgctgttagacacccccacgttactcaaacagcctctgagtgggtcaatggtgttcacctacagttaaaaaaaaaaatcacacaggcctgggataaactgactggttcgtaatatttctatcagttcaggaagagcacattctattttacaaagaaaaaacagaatctcccagaaagggtgcccagcagcccaaggcaaaagcttgatagcctccttgggacgttctgcacacctggacgccgcgacggccaggctggcgctcagcagcctccatggcatgtgagtaaggatgactgcagccaacggcacactggctctgccctgtgtcgcaacgtctggcgtgggcccaccaggcggcacgtgtcacaggctgtgcagagggcaggatgaggcgtcttcacgggcgtcagctgtccctgtccacagatacatgggacatctgtgttctgtccactgacatccggaacatccgggaaatgcaaggcccaagtgttaccagcaagttgaaaatgggactccagaaatgaatgacgcttgaatgcagagggccggtgtgatcactgcttgaggaaagggcaaagggcccggaaggaaaggagagcccagaccctcaagggcacacacagactcaaggcttttacagaacttcacgcttccatcttaaacaaacaggaaaaagcaggtgttaaactgcattttcatgtgagattcccctgcggagactgtaaccgcgctcgtgctatagatgacgaagcagtatcttctccctggcaagctgtgcgggggccgggggggagctcagggccagggccggcctcatcccaggggtgcgccaggcctccccggggacacagagctcagagaggaggggggatagcgtggttcccgcagcgctgaactaacagacagagaagactgctccatgaacgtctcaaggaaaaaccccaagtcacgaagaccacaagcagatatcctcagctgacatttgagggagctcagcattaagggccttccctggtggctcagacggtagagaatctgcctgcaatgcaggagacctgggttcaatccctgggtcaggaagatcccctggtggagggcatggcaacccactccagtattctggcctggagaattccatggacagagaggagcctggcgggctagggtgcatggggtcacaaagagtcagacacgaatgagcgacttccactttcacgtgcagcgttaagataaaagcctcactatcagaggcatccagacacccagagtgcccactgccactcaaggaggccacgcagggcaccacctggacaaggactggacgctagacccggcagatgggcctgctgcacggagggacctgggtctgggggccacgcccctcctaagtgacctcagggccagggtcatgacccgccccggtctccaggctacgaggggatgacaaggaagacgctgtcaccacagctaagagacacccagaccccacagacggcctgtgggcccgtcttcccagaccacgagccgtgaggaacgcagccctgagggccaagccaggctccacagcctgccctttcctcctccgtcctccgccggccggctggagctcggcgtgaagcccaggagtagaaaagtcccctgccgtcctcaactgacagcagggaggcactgatgctcacacgcaactttcttcagaagaatgaacctctctagtgccacacgggagagccaagcccactctttcctttgtgcatccaactaaggtaaaggcccctcgttcaccttctatgacgagaacggccccaagaaaaaggaccacggcgcttcaccggcttggcccaaggatgcactgccgatgtcctgtgacccccgggaggggccccctgcactcacgcggcagcaggcaggagagatcggggtggcctgtcacgagtcccccagaacgtggcctggcctgagggcgagagggtggcggtggtgggcacgcctgcggtgccaggcccaggctggctggagcacagggctcaggcctcctctgcagagcgcagctttccggtccctcccggatctgaaccccgaggagcgctgtgctcatgggctcttggagggccctcgtgtgctccccaccagcagaggtggggggcaaggagccaaggaggagacgagctgggcagacagggctgggtgcctcgcccagcacaggggagcccatgggctgaagaaagagctggtggtcgggggtcccgtcgctcaggctgcacctctgtacgtgggaacatggagagaccgaaggtcgggagtctgcctcccaccccggcctggcccctccctctgaccggcagacggatgcactgagttcctgagtccagctgctgcctgaatttattttgtatttttagctacactggcttctcagtggctcagatggtaaggaacctacctgcaatgcaggagacccgggttcagtccttgggttgggaagatcccctggaaaagggaatggcaacccactccagtactcttgcctggagaatcccatggatggaggagcctggccggctacagtccacggggttgcagagtcggacacgactgagcgactcacacgctgaaggcaaggccacagaaggagctgcagagccgcacgatgccgacgcccctgcagcggccagcaagtggcttcagcagtgggcacgggagaggctcgcgccctggggatgcctgctctccgggaggaaaaggccagcactgaagctcggggcatgcagctcacccggccccttctccacgtgacattacacagccctgtgacagggcagcttggcctcgtcatgagctaccaggaggccaaggcagcggccgccggcggctctctacgtctctcaccagcacgctgcaccccggaccttccaggctctccccctgccatcacttcttccctggtggcctgaggctaagactgcgcttccagtgctggaggcccaggtttgatgcaagatcccgcaggctgcatcgaagacccggtgcagccaacaagcaagcagagtagataaatcagcattgtttcgacagccagcttagggcactagcgaccgagcccggcatgagagaagtccgtgtctcgccagggggcaggcgactgtctgaaacctgcgtccagctgagtcggcaggacagcaagggcagaaactcagggagaaggaagggcgtggagcctggagcctctcctgaggctgtcccaaggctgcccgcctcagccacagctcacggggtcactgtcactgtttaaggaccctcagggcaggaggacaagtcacgggtcccacccagggcagagagactgcagctcctctggagggatgcatccacgcctgtgtcagacgctggctgggagggagtggactaagaaggaagcccccctgggagtggacagtcacagaccgcctcgtgggggccgggggagacccagcagtcagagaccgcctcgcgggggccgggggagacccggccaacaccagggcatagtactgcacccacaggggctgcttctgtgcccgcacgaggcacacgtcctccctggccgagcgtgctgtcagccacacaggacgcccggggaacactgcatgggcggaaagtcacagctgaagatcacagcgcagggaaaaaaaacccaggcagcgggagtcaggccaggacaaactgcaattacaggaaaatctaatgtgaccacaagatcatctccacaacaggtctgaggaaacagggccaccgaagggtcacagagcagaaagcggatgacggggcccgcactcagcagttgcttggccctgtgtcccgggccctgtctgcgtctcaggctctcacctgccagagagaaactgagagctgcagcttccctgagagacagctgagggaggggcgaatgagaccgtcaaggtgggctccgctgatcgcgaacgagcgctgctgatgcagaaaatggccaggcacgtttgaaaatgatctgaacagaaccggtagcaataagaaagctaatggtgaaaggtcaaagatgaacgaacgagcgacacgatcgattagacagagctggagagaggacgcgagaagaggagactggcgctgacggagggctgggtgcctgcccccaggaaaagatacaactagatccgagcaacctccacgcggacacgggccccacctgcccaggatgggagacacgagcccagaagaggaggtggcctggggacagagggaggcttcctaactgcaactcaaaagccagatgcagttgaaaaaacagaacttggtacgtctgaaccaccacggggggaggcgggagaggcagtcaacagggcaaaagcgtaaagaatatggagaattcaccataaagaattcacaaaataactgacaaactgggagaaatcgtttgcagactctcacagataaaagctaataccccctacatataaagaagtcttaaaaactgtgggaacagagcctaaaatcctgaccaaaaaccaggtcaaagacataaagacagagaagaggcctcatgctgcggtcccccttatcaatcagatggacaaacagtaagggcctctgccggcgcggtgtgggaacagagcgggccgcctgcgggccgtgccaggaatgcacgtgcccgcacccgctcgcccggcaccggcccctggcccccggccccacacgacactggctcctcctcagtccatggtacttggttcctgagtctggagacacacctcccaccgcggggaagcgcgccagcaccaggggaccacggggcacggctctcaggcgcgatgcgggcccctcctggaggcctgactgccggacgcaggagcaagacccggcgagctgtgagcgcacccgcaggtcggggatggggcggggaggagccccgggagggatggggcgaatgtgctggggcggaaaagccgagtgcacaggagcagcctgtgggatgctcgtcctttgtccaggaggcaacgcgggagggcgagggtgaggctggggagggggcagggcccagggacagaagccagaggggtaggggtgatggacacccctgctcagtccaggctcctacacagcaccggcctcgggggccacactcatgttctatgtactcaaaaagtaaagataaacaaatgaaaataccgcacagtgagtaaaagcagtaaggatgaccccagacccactgcagatgaagaatgtgacgccctgggccagaggaaggggcagggaagaaccggcccacgcagcctggggacacggtatttggacgatgcttagacttcacccctgagcaaggactgagctccagttataagagtgtttctcacagaggcgtagattaacaacttctgggcattctggggttgaacaaatgagtaaatacatcgcggagaccgggagccacgcttcccagtgtcggacaaagagtcagtcacacgtatagcaaagagcaagggcctttaagggaccctgtgaggagctggaagcacagtgcgagttcacggggctctaggtgagtttgtgtgcgtgtgtgcccgagtcagcgctcacatggacatccgtgttccagcgctgggcactgggcggcacctcccgcacaccaagcctgcttcctaaataccagcccctggaaacagaccctggcctctgcagagaaccagctgactccggggcaggggggcaggcggacacgagaacgcctcactgtgtcgcagagagtaaagggctcacaggtgtggggtcggcccggggggggctcccaccagccagacctgcacagtctgggcaccaaacgagatcttggtgacgacgggactacaagccggtcagcaaaacagccactggtccaaacgaacctaagggtgatttctctgacggccggagagccgtcaggcttcccaggtggctcagcggtaaagaatctgcctgccaagcagcagacgtgggctcgacccctgggtcaggaagatgccctggaggaggaaatggcaatttccagtattctcacctggaatatcccatggacagaggagcctggggggcgacgacccatggggtgcaagagttggacacgactcagctactaaacaagagcaaaacataaagacgtaaacatacaaggaagggaagttcttttttacaggaaagagccaatggctgaattaacaagaaagacaggactagaatatcaccaagcgcaccatcaccacagtgacagctccaggtgtgagtcatcagtgggtacagaaaccagagtcagaaactcgggggcctgaacgccgtggaggcccctcttgagatcgagggctttattaggacacctggcaaaacatgcgtcgggcccccgaggagataacgctgcgacgtggttggtattaatagctccctgaggtcggctgccatgccggctgctgacaagctgcccttgttcctgggcgacgcattagttgggggaagggtgtcatctcaaccactcactttcaaatgagtctgagaaagttcatttttaaaaatacaaacgtatacagtaattttctgtactattcttactgctgtaagtctgaaattatagcaaaattcaaagttaaaaggaaaaacagaaaaagggctaaaatttccccagaattttttgaaagacattaacccagcaccttcagcaactccaaaaaaacgtcaagatggataaaatggaaacactcagtgaaaacagagcaaaaaatacttgagactaagctcacgaaagcaccgcgagagaagcggtggacccttgcaaggacaggtgtgcgggcagggacagttagacagcggcagacaggagtgcgggcagggacagttagcagcagacaggagtgcatgcagggacacttagcggtggacaggagtgcgggcagggagagttagacagcggcggataggagtgcgggcagggacacttagacagcggtggtgggaccctccgggccgacaatattttcaaagtgctgaaagaaacagctgtccacccggaagggtccaccccgggacggcagaccggggtgctggggagagaacgccatttcggacagacagacagtgcgagagtttatcgctgtaagaactgctagagaaacttctcaggggtgtcactgccagcagagtaagatccaaagagaagcaatggtatgcaaacagaataaatatgagattaaaattaggaagctggactcattaagaaagagaacagagtgacaagatcggacatgcgtgtagaaggcaacacacacgtctaacagtggctttgcatccagctactggaaggaaatacacacatgtgcgtgccccacacaaacacacacagatacatacacccagagagagcagttctgcagatgaaggagaaaagagaacacacagctgaacagaaagacagggacatcaaaagaaaagctatagatgcccaaagcaggccgctccgttccctaaggcgaacatggtaagatgcagtttccaagcctctggcaggggcccgggtgggggtgagggaaggagggcgccgggcagcccctggggatggactggcacagtgacgcggcactccactgctcgacagtgaccctcagaggaccctgcacatgtgccagaaagcactgcggacgatgctgaaagctgcgtctgaaggtagcagcaccccaaggcccactgcagggccatccataggaaaatgagcacgctgtgaaaacacacaaccgatcactcagctccagcgaaaatcagtcacagctacacgcatgaacgtgaatcagcctccaaaatagtcgtgtttaaaaaaaaaaacatggaacatacagtataattccatttacatcaggttcaaaaacacgtaaaatgaagtcgcattgttgaggaacacggacagatgaatttcttaaaaccaagggatgaatttcttaaagcaaaaacacagaagccctgccaacggcccctggcttaacagcggggagggagtgcatggctccggcttgttttctcctttaaatgacactcctcacattcttcaggaggtaaaatattccataatcaaaatttttaaaaaacgtgtgggaaaatttttaaaggtatacctgaagcgggctaagaaagtaataagtcaatacagaaaataaaaatgaagggaaccatggagaattgactgcggcaccccaccaacccgggacagaagatatgggcaggtccaaatgtgctaaacagggaaacaagagaatgcagcgtctgagaccctttctgcagaaatcgggactctcacataatcaaaactgtctacttttattgcacttttctattaattactggcaaatgcaaactagacggattatcatgggtttcttacaatctaagaatctgttgagagtttcctgtttatctctgctggtttttcatatcttactgacacagtccacatttaaaagtgaaagtgaaagtcactcagtcgtgcctgactctttgagaccccatggactatacaggccatggaattctccagaccagaatactggagtgggtagccgttcctttatcctggggatcttcccaacccagggatcgaacccaggtctccccacattgcaggcggattcttcaccagctgagccacaagggaagcccaagaatactggagtgggtagcctatcccttctccagcggatctttgcgacccagagaacaaactggggtctgctgcattgcaggcggattctttaccaagcaagctatcggggaagccctgtcgacatctcaaacgtaatgaacaggtgactcactaagctgctgctgttaggacaaggcgtctagaagttcccaactgtgaaacaggcttgcttctgctttcaaataatccttaactatttataccaactgttcatttcctccaaatttggggactttttggtattcattacgaaaactggaatatttatctcatcgtttttataaaaaaaaaatctcacatatttcttaagttctctactttccctgtgccacaacgctcttgcaacagaaccttaggttgggaataaccagagaagctgctctcgaagtctttccccaatattccatgtagggttttacatctccacatgtaagtacaagctgcacagaatttttgtctcatttttgtctccagcaggttctagaatgaaggcactttcagttgcacggaatttgataatatttttctaggtttagaggcaatcttaaggagggtcaacatcacataaactttgggaaaatattgagtaaggagtaggtgcttttaacaaacattcaggcaaactaccatctgtaggaccgataaacagcaaggccctaccgtgttgtacatggaactatactcaggacactgtaacacagcataatggaaaaaatgcaaagcagaatgtatacataggtgtaactgagtcacactgctatacagaagaaattaacacaacagtgtaagtcagatatacgtcaatgaactgtttttttaagaaaagaaacattgagataggtcctttacccccaaaccaccagcccccagcacactctcactgcctatgaaggccaggaaggctgagctcaaagcttctaagagcagagcaaatgcgtttgcacttttacggaaggcagaaaaggctatttactcagagtgtttctgtctaagcttcttattggagatttcaccccgttcctcctgcttgttttctttatgactcggcacttcaaacactggcatatatcttcaaggtgactatatttattcggagaacctgggttcagaagcagctttccaaagatccacatgggtccactgtcttctctgaagtttatctttttgcaaaatgacaaaaggttcaatgagaagaaaaactctagcaagtttctctgcatcagctagcacctatttatgggataagcgtaataatccctaattcaatgatgcacgcgcaggtaatcaattgctttaaatggctacaagtcctgtgtggcagtgcctacgggcctgcagcaggcctcctgtcacccttgagaccacctgccgctcagggggaccatggagaaaccctgacctgccaggcctatgcgcccgccaagcccccgcacaggcacacacacacccagggcggtcaacacttcccctgacagcccatcacacctcctcggggcctcggatcacggaggacaaagtctttttaaatgtcttaagaaatatatgcttgtccaccccagatggctcagaacagcagctcccagaacttcaagtctcttaaaaattacccaggaccccaaagacttttcatgacatagtgggacctaatggtatttgttgctgttaagctgcaaggtcgtgtctgactctttgagaccccatggaccgcagcccgccaggctgctatgcccatgggatctccaggcaagaacactggggtgggctgccattcccttctccaggggatcttcccaacccagggactgaacccacgtctcctgcactggcaggtgggttctttactgctgagacagcagagaagcccaatcaatatttactgtattagaagttaaaacggagtttttaaaaaacattcacctaattcatttcaaaacagtgatgaacacaaatcacctatttttagggaaaaaagaaaaagcaccttttctaaaactgggaaaagctggtggaaggaggcgctgtctgccaactccgacgggatcgctcaggcggggagccgacacctctgcttccgagcttcgcgtgttgtgacaggtgtctgggcggcagtgacgcgggaaagcgccgcggagacacggctggatccgggcgagcatctctgcggctgcaggatggccgtgggcgggcctgtctgacgtgagtaggccggtcccgggtgagctcgtgcccccggcccatccttgcaccgcgtccccgacgtcagcactcgtcccgtgaagaggctgctcccgcgggggctgcccaaggcgtcgcgggtcagcagacacccgggggtcgcaccgctccaggatgctgacttccagctgaagggtcaccctggcggctcacacgggtggctcttttccttcatgtgacagactgacctccttctgagggaaacccctggcaggtcctcaggtctgaataaccacagttatctgtggtggttctttctggcaaggaccgtgtcccatgaaaagagtggctaggccagctggcaactcgctggctgagcggatcgtggtggttcggcttcggtgcaggagaagggccatctgtgcacgtcccctcatcgtctaggatgtcaaaaagacgagcagccccaggatggagacgctgcgtggaaggaacagtcgtcctgcctcgtgcagaatatccccaactgaagctggctcctctgggcgacgcccggcggggaggaagccctgggcgctgtgctgtggcaccgctttgctgccagctggggcccaggcactgccaccactgctgttcccggccaccagcagacacagcagcgcagtgagaaggaaagttctgtctcagaactcttacagaccacccccaaggggctaggggacccttgcccatttaggaaataaactgctttcacgaaaacgatagccatccagtaaatctcgctaactcctggtgaagctgctctgtggagccgggcaagcctacagaggcacaaaggtcagcctccactttccaagaacacacagcctagcaacacaatggatcacgcaaaaggatggaggaaggcctgcagccacgcctctgtctccagctcttccccagccgggcctggaggggaaggaagatcccacaggactgagggaagcatctgaaggacgacagctcaggcccagggccagggagggctgcgctcagggacagccaggtcacaaacccacagggcctgtgcaggaagaaacacccacctccaagcaggcggaagtggcacaaaaactcagtttagggatttctctggcagtccagtagttgagagcccgccttccaaagcaggcagtgtaggttcgatccctggtcaggaagctaagattccacatgcttcctcggctaaaatcccaaagaataaaacagaagcaatgctgtaacaaatttaacaaagactttaaaaatggctcactccaaaaaaaaaataaataaataaaaggtaacactcactaaaaataaaaaaggcaagaactgtgcattgctcttaaaatgtttcacttgtaagaaacactaacaattccagaatgaaatacagtttctgtagcgccctctataatgtaagttacaacgtgtctatctggaccaggatacagacacaatggtgtgcatttattaagcactgaggaagtctgatataactcttcaaaggctaaggattaagataattgaaagtgtgaaactggatggcagcttttaaaaaagagaaagaaacagctgtagtataacaacgggaaacttctggcatctgaggaatattttcaaacagaaagtgctcagagaacctgaactgtaaacccaactaagacaagctaaggccaaaatgtaaccacagttactggaaagaaacacagcccgcaggccctcgacaagaaagcctgtcctgctgcaaaccaccaacgcgaacagaggcgtctgctctgcgcggtctcagagacttaggaaaagaaggaaaacgaaagccaagaggacatagcaacttgggtctctaaacagtgtcgattaaatatgagaacagcaatgctgaaacccattaaaataaaataaataaatcctgcataaataaagctctccgtgacacccacagctctctgtgcatgctcctggtgggccctgggcgaggctgggggtctgtatgtgcccccaaggtgctggacatcaccagcgtggacatcatgtcctggatccctgggcagaaaatcacgaggctccaggctggcaaactgaggacgtggccggcagggccctaatcccgtgaggctacgaataagagggggcgtcaactgtgaacctcggctgaactccacctgctctgtcccctgtataaactcgagcccaccgctctcaaactctgcatccctggagcatccctggagaggggggcacctgagtgggggaggttaagggaggtgcagactcggagacacagtggcagggactggaggcagagaaggggaaactgtaactggagaccacatctctgtttaggaaaagcaagatccaggacgtccctggtggtccagtggttaagaatctgcctgcccacacagaagacacaggtttcctccctggtccgggaagatcccacatgctgcggagcagctgagcccgtgcgccacaaccactgaagcccatgggctccggggcccaccctccccaagagaagtgatgccaacgagaagacccccgcaccgcgacaaagagaaacccccggccgctgcaaccagagagactccaggagcagtgatggagacccagagcagccagagatgtaccagttatttaaccaactttttacaaaaagcaagatctatactgatctgagattatagctctgaatgcttccaaagaaaacctttaaacaagtcatgtcctcttcacccagcgatgctgaaacaaagagatacccaaagacaatgcagctggaccccgactccaccccatgtgcaaaactggactcaaaacagatcaaggacccaaatataagaactaaaaccagaacgctcttagaagaagacagaggggaaccttcatgacagtagagttggcagtcggagcttcgctacgaccccaaaagggtgaggaacaaaaataaataaataaatctggacttcatcaaacttaaaacgtctgcacagcaaaggacaggcattatggagtaaaagtaaaaagacaacccatagaataggcggaactatttgcagagcataaatccagaatatatggaaaactgccccccaaactccacgacaaaatacaaaccgctcaattcaaaaatgaacaaaggacttgaataaacatttgtctgaaggagggacacacatggccgacaagcacaggaagagatgttcagtccattagacatctgggcagcgcaaattaaaaccacactcagacaccacttcacaccagcagaaggttatcatcaacaaacaagcaaacaaaccaagaaggaaaataacaaatgtgggggaaatatggacaaactggaaccctctggtattgccaaagagaatgcgaaatgcacagccacagtgggaaacagttcagtcgtttttctaaagttaaaaacagaatccccatatgacccggcagctctatccctaggtatcttccccaaagatgcagaagcagagactgacaggccgcgtgcacaccagtgtccgcagaagcatcattcgcaacagccaacaagtggaggcggcccaggggcccatccgtgggtgaaacaagtggaggcggcccaggggcccatctgtgggtgaacgggtacacaaagtatgacccgtgcacacagtggggcgtcaccagccttaaaaaggagcgaaattctcatgcattgtgcaacacggatgaccgctgaaaatgctccgccaggtgaaatgacccagacacaaaaggatgaacatctatgataccacctgtatgaggcctccagaagagacaggctcacggggacagaaaagcaagccaggggctaatagcagagaggaacggagctaatccttacagggaaagggcttctgtttgggatgaggaaaacgttctggaaatagatggtactgatgatgacacagcactctgaaggcacaacacttagaaacggctcagatcgccagtctgtgctatttatatttcacaacaattaagaagcacagcaaacaaagacactggcatacgagtttgtaacgggactgagataccagccaagcatcaaaagagaacgaggagtcattttattaactaatacggaaaaaacttgaggacggaaggatgaacacagaggggctggttgggaaaaggaaacaacaggtggctctttaaaccccggtgacttttctcaagagctccccggccctcctgctgagcgccgcccgggcagcagccagagcccctgcctccaccgcggcagccacctggggcgggcgaacggctccccaggaacacgcccagccgggctcctgaagagacacaaaccagaggcccccacacaagacgcagagaaccacagccctcagccgcggctcctcgcagctgcacccgctctggcgagcgccaggcttcagccccaacgatgaaccaacggccttcctgcgcaagtgtctgcgagcctctgatgtgcggagccgcgaggaagcgcgggccggcctgccagcgacccaggggggcagcgcccagccctgtggctgagctgatgctccaggaggctccttctgggtgaaggggaggggggcacagcagggaagtggaggagccctgccccccgcagcggaaggcgcaccggctcccgaccctgcttccggccactgcgtggggccccgaggcacaggcggcaggaatagcctcctctgcccacccgggacagggcgcgcctctcatccgccgggcaggcctctgcccacccgggacagggcgcgcctctcatccgccgggcaggcctctgcccacccgggacagggcgcgcctctcatccgccgggcaggcctctgcccacccgggacagggcgcgcctctcatccgccgggcaggcctctgcccacccgggacagggcgcgcctctcatccgccgggcaggcctctgcccacccgggacagggcgcgcctctcatccgccgggcaggcctctgcccacccgggacagggcgcgcctctcatccgccgggcaggcctctgcccacccgggacagggcgcgcctctcatccgccgggcaggcctctgcccacccgggacagggcgcgcctctcatccgccgggcaggcctctgcccacccgggacagggcgcgcctctcatccgccgggcaggcctctgcccacccgggacagggcgcgcctctcatccgccgggcaggcctctgcccacccgggacagggcgcgcctctcatccgccgggcaggcctctgcccacccgggacagtgcgcgcctctcatcagccgggcaggcctctgcccacccgggacagggcgcgcctctcatcagccgggcaggcctctgcccacccgggacagggcgcgcctctcatcagccgggcagggaagtcagcacctcagatgcctccccactcacggctggtgctcctggaaagcacggtggccaaccgcttctcctcctgaaagtggaagcaagcccactcccccaggcccatccctctggacccctcgccactctggctaggaaggcaagctccttgaagacgtcctgcaggccaggacttctgcaggactcacctgcagcgggctcagttacaccgggccaactgcccgaatgacccacggaaacactggaggcccaggccgtctccgaggcaccctggaggaaccatgacgcaggcctgagcccgctcccttgtaaactggggctttgggggtggcgtgtcatttggtttccagccctttctgatgacacgggggtagcactgccagggtgcctcggcggaaaagcttccacagggagaatttcgggatgggactcgggccagggtctcgcagaagattgcaggtgctgatgtaaagcatcagaggagttttataggaggctacacaggcttagggtctgaagagtgtgggcttcccacaggccgaaatgagactgaaacccatgcacagacgccccactggggggaggcaaacactcctgacggagaagacacggtgtcactgacacgggagaccggggaggaaaagcacactcagcgcagaaggcacgtctctgccagccccgccccagggaccggtccggggagctcgggcccttggaggaagggcctggccgcacacagaggcgctgggcgccttcccccggccgcccctgctggcgctcccagggccgctgagctggccgggagtcaggaacggcggggctgggcaggctgtttatgtctgatccggacaacggagggcttatgacgactgactgacgcgagagcgccccgacgccgcatgccagaaatccaccgcgggaggaggaattctttttaagagaccactcggaggcctcggcccgcctgacaggctgagagtgtaagcggagctctccctccaggcctcgggccgccagggagcggcagcatgcccggggcccacaggccacagggccgagcgtgggcagagctcccgagccaggagagcgaggcccagaaccgggtgcagagtccagccacacggcccaccgtgccctccgcgggccgcttctccccagacggaagccagggcctccgccagccctcccagggcccaggcgactccagaaggtcctgggggaccacgccgggctgggcagacctgcaggcaggttctcctgctagggcgatgcatcgccctatttttcatgttggcaaaatgccttcctcgagagctggcctttaaagtctgcagtcactaatcactgaggagaaaaacgtggagacacagacgtttggtctcggtccatggtctcagggcagcaggcccaagagtcgtgcgccagtgtccgggtggggggcggggggcagagaacaagcccaaacagccccccgcccgcccgctggcctcgcgtgcctgcccctgcctgccaggcaccccccttcgctggcagccccgctctgtgccacctgtgcccaggcagcagcaggtgggaccgtctggaccaggccggcagttggtcttggctgggggaggggaggccgatgagcagacgtgtgcaaacaccctcgctggaatctgctttcagaaatgatgtcagcagttctcaagtttcaaacacgaaaagacacgcggtgtttatgtttatcaaaagggcctgagcctgacaagggtgatgagcgtgagacttgccagacactcggggctgggcctgggcctcgtgacaaggacggcagctgccacactaggcgcacgctggccccgccaacccagccaaccctcacggcagacccccaagactagcctctctgcgtgacctccattctcagaagccaagcccagagcagaggtcaccagttccctggggggccagggtgggagcccggaagcccactcccagaggacactcagtgccagggagctcagcggaggaggctgtgaacgcccgagggcgcctccccgggcccatcacgagcaccccatccttccggctgtggggggcacagtgaaaagggacagggaggccacaccattgtcgagcctccacctccccaaattgacgacccagcagctgccaccccccagggaagcccccgcatcgtgtcacagtggcacttcactcgccaacacgggtgctggcttcagcacctcccaggccacacgggggagcctggttgtggcgtcctggtgacctggggcgaggcaccccaagaggccagggcgggggagttctgtacaagagcaggagccgccaggccagcagcagccgcacggcctgcctgggtctctagacaagaactgccaggccccatcagctgcctggacacaggcctcggcgctcagcagggcaggcagggcggcagcaggccacagagaggcgtgtggctaagcaggcccgccagggcctggccctcggagaggctgctccctgccaccaagcaggcacggacctccgctgatcccagggaggagctggggctcccaggtcggccagccttcaggatgcacattccagaaaaacaaagtaactgactgcagtgctgaggtggtctcctggtcataaagcctcacctcctgcagggagggaaatgctgacttcctgaatactgctgctgctgctgctgctgctaagtcgcttcagtcgtgtcctgtcctactctgtgcgatcccatagacggcagcccaccaagctccgccgtccctgggattctccaggcaagaacactggagttggttgccatttccttcttcagtgcatgaaagtgaaaagtgaaagtgaagtcgctcagttgtgtccaactcttagtgaccccatggactgcagcctaccaggctcctatgtctatgggattttctaggcaagagtactggagtggggtgccattgccttctccgacactgaaaactagcaatctgtaattcaactatctgtaagtaaaattatgtgttgaagcttaagctccaatactctggccacctgatgtgaagaacagactccgatgctgggaaagactgagggtaagagaaggggacgacagaggatgagatggctggatggcatcaccgactcgatggacgtgagtctgggtaaactccgggagctggtgatggacagggaggcctggcgtgctgcagtccatggggtcgggtcgcaaagagtcagacacaactgagcgcctgaacaacagcagaattactgacgggacagcaacaacaaaatcgtatttatttttaaaaggtctaaattagcaactataggaagaaaatatacttaaaaaaccaaacgtagtatttataaggtaaccacattatatgcagtgcatgtgttagaaaacagaaaaagtgaattttaatggggaaagcagtttctacccacatcctcccccacacacacacaaaaccagaagccattaaagaagaggggctgtctcacaacgctgcccctaagcataaaaatccccaggtcgctatttgctgacctgtggcttacttccaaccttgccagccttggctgccacttgaacgtgagaaccgtggaatctcagaggaggaaggagccgagggatcctttactacccaaccccacccccttctcaacacacaatggaaacgggggcccagggctgcgtgagctccaccctacccagtgcagaaaccatcgcagctacagtcatgacattaacggcatgaaaagcaatgtcctacgaaataatgctcaagctaaacctggaatgaattcttcattcactctgggggaaaaaacaagtaagttaaaagcaaggggaggcggtgggggaggcaggctggcaggaaggcgctcgccaagtgtgcgctgcactcagatctggggactggacgtttataaggtgtgacatcaatcacctcgtaaaacacccaagcagaagtgctgcgagagcagcccggggccgcaggtacgcttcggtccgctataaagtgtgcctggcagttacttcactggaaccttccagaaaggtcagggcacgccgggacagtcacccgggaacccttccacacactacgtggcaccttccactttggctccggccaactagcccacgttgggccagccctgcagcacagcggttaacataaaaacatacgtgtgtaccatgaaggctttggagtcagactagaggggcgcaggcaggagagagaaaaagagggagaggagggcacggtttgaacccatttccccaggaggcatctgctgacacaccaggttccacgtggagggtgaggagcagaccctggggagtgagatgccttcagagcctgcctgtgcggagggttcatgcaagcctcctagctgggacgcttacatattagctgactcattggagaagaccctcatgctgggaaagatcgatggcaggagaaggggacgacagaggatgagatggttgcatggcatcaccgactcgatgcccgtgagtttgagcaagctctgggcgttggtgaaagacagggaagcctggcgtgctgcagtccatggggtcgcaaagagtcagacaggacttagcgactgaacaatgaacaacagcaaaagaatgaataccaactcaaaattacaacaaggaattttaaaatatcattctcagtacctgacagaaaaagcaggtcacaaaaaccagtaaagcagcagaagagctgagcatggtgattagcatatttgacttaatagacacacacagaatcgacgaatctcaattattttcttcaaataaatataaaaaactacaaaattgacgatatcatgataaaccaaaatacaaaaaggttttaaaaactgaaagtaaataaaaattcagtgaccataatgaaattaaagtagaagtcagtaacaaaagcaaaatactaagaaaggcaccaaaggctgaaataaagaaataaaataacccatgagtcaaagaagaaatcaaaaaggaaatcaactattattctaaactgaatcacaatgaaaatggcattaaaatacctatgtgatccagaaaagtcaaatataagtgaaaattactgctttaagagcatgcactatgaaagaagaaaatctgggaataaattcaatggacataaatatttgtctcaatttcttaaaaaaaaaaaatccagagaataaaaggaaatactagcaataagatcagaaattgattcttttttaaaaatatctaatagaatgaagaaaatcaaacatggttgtttgcaaatgttaaaacaactgtcccagaaagtccagtggaggaaaaaaaagagaaagaataaacaagcaatatgaatgaaagggacatcagtataaaccctacaaacgctacaaagataacgcaagagtatttaaaaacctacacaagtacatttgaaattttagacagaaagaaaaaaattctgagaaaaactaaacacatcaaaacggacacaagaaaacgagaaactttgaatagtcctacatcagctgagggtataatttagaaatcatcctactaagaaaactacaacatacgttcaccaatgaattcttctgaatatttaagaaagaagtaacaacatacccttatataaactctaatccactgaagatcagacaacgatggcccaaagccgtatcaatctgtggcctcactttgtacaatttgctaagtaagacgggtttttacaagtttaaatgcctgtttttttaaaaaaagaagaaaaatatgcaacggaaaccatatgtgttccacaaaatatttaccatctgactcttttaaaaaaattctgtcaactctaggaatagaaaaagaggataatctcattccattttaagaggccagtataaacttcatattagaattgaacaaagacatttcaaggaaagaaaaccacagaccaatttcagtcatgaatttagatgaaaaaaaataagcaaaatagaagcaaaatgatttcagataaaagaagaataatatattataatcgagtcagatttactaagaaaggtaagactggttgacattcagaaagtattcaagaaaattcatcacattaatgaaacaaaagaggggaaatcatacaattaatagatgcagaacaaaatgtaatatattgttgtttgtcgttgttgtttagccctaagtcacctctgactcttggcgaccccatggactgtagcctaccaggcccctctgtccatgggatttcccaagcaagagtactggagggcgtggccatttccttctccagggggtcttcccggcccaggaactgaacccatgtctctcacattagtgggtgggctcttgacgattgaggcacttgggaaaccctataatatactaaggtgaatcaagtcaaagtgtcatttttgtagattgaaaaagatcaaacatctgcataccatgtggttcaatctagtattgtaacactgtctcatgagaaaattcaactaataagggcagaagagagctgcgctggtctgattaaggctgttacggaaaacctacagcaaatttcatccttaacgatgaaatgtgaaagtttctcccttgatgttcaaacaagacatagatgctcactaccactagctctgttcaacatttgactgaaggccccagacaattcaataaagcaagaaaaatacatagaaagttgaaaacttggcaacaaaaaaattaaaacgtttactatccacaaacagtatacattaatatcccaaagaatctacaggtaaactagagtaataataagccaactctgaaggctgtctagagacacagtagctacacaaaaactaactgcatttctaaatacaacaaacggtaaaattttttaaaggcaccccatacaatacctagaagcaaatgtaatagagagtgcgaaagaactctgccctgtgaaatacaaaatgaaaaatgtgattgaaatgattaaaggagacccaaacagaaagatgcatcacatccacgggttggaagattaaaacaaactgattttatacacaaaccagtgaaatgcccatcgagatccccgtaggtattctgctggaattgaaaagctgattttaaaattcatatggaaaggcagtgggccaagaagaaccaagacagcctttaaaatgattcaaaaaagctggaggacaaacaatgccagctgttagaagcaatcatacagccccatcagttaactctgtgttcactgacacacagataaagcccaggaacagagccgcgtgtgtgacggcggctgcggacacagtggcaacacagcagtggaggaaggaagcagcttttaacaagctgatgggccaacggagcgcccaaacgggaaagccagccctcagctactgctgcacatcctattttcttaaaaaatcaattacgggtagaccacagatccatttggtaaaatgacacttctagaaaataatagactgcaagacccaaccagtccatcctaaaggaaatcaaccctgaatattcactggaaggactgatactgtagctgaagcaccgatcctttggccacctgatacgaagagcagactcaactggaagagatcctgaaggtggaaaagattgagggcgggaggagacagggatgacagagcatgagacgtttggatggcatcagcaactcaatgtacatgaatctgagcaaactccgggagacagtgacggacagagaagcctggtgtgctgcagtccacggggtcataaagagtcggacgtgacttagctactgaacagcaactacaacagaaaataacagactctttccgttgcattcaagcaggcataaacaaaatgaccagtagctggacaacgtgaaaattaagaacatctgttcatcaaagagcatcattaagaaagtgaagaagcaacccacagacttaagagaaaacagccaagggaacaatcaacaaaggattcgtctcttgcctatgaaaacaacggccagccagcaggaaaaataaagacaatcgagtctcttaaacgagcaaaagacttaaacaggcacttcagcaaaggggacgaagctgtttgacgtatatatgacaggatgctcagcaaattcagtgactggggaaatatgaggcgcgtctcagtggccagaacagaaaggagtcagtaccacttgctggccagcaggcagcccggaggtctctcggagcgtaatctggcacaggagatctgaacagcgggctcacgcacaccttatcaaaagaatgcgtgggagcacgtgtgtaaaagccgcagcccgaaaccacccaggggtcgtcaacagacaacagacgaactgtgatctgcgtatacaatgaaatatcacacacccgtgcaaaggagcacacagcctgggtcacgtggagtcagtcagtctcacaaactgttgagggaagaaagacagacagaacaggcagatgttctgtggctgagtttatgctgctgctgctgctgctaagttgcttcagtcgtgtccgactctgtgcgaccccatagacggcagcccaccaggctcccctgtccctgggattctccaggcaagaacactggagtgggttgccatttcccttctccagtgcatgaaagtgaaaagtgaaagtgaagtcgctcagtcgtgtccgactcttagcgaccccgtggactgtagcctaccaggctcctccgtccatgggactttccaggcaagggtactggaatggggtgccattgccttctccggctgagtttatattaggttcaaaaccaggagaaactgatccaaggtgtgagaagctgaaaaggagattcccggggcggggggcagggaaggggctgcataaaggctgctggggtcccctgagctcccctcttcccactccgcacagcactcaaccagtgtcttcctctcgtgagaattcaagagaagcactggtggtttgtgcatctagagaagatgcgtgtcctaccccagtacaaagttcactcagcagtggggcccctcaaggcagcgctgttcagggcagcagcaatagtgagagggctggaaagaaacccaggatccaccccgagtgcctccttaaacgagcaacatcacacccacgcacaaccataaaaaagaacaggacattgttctgtactaatttgggcttcccttgtggctcagctggtaaagaatccgcctgcaatgcgggagacctgggttgggaagatcccctggagaagggaccgactgcccactccaggattctggcctggaggactgcgtggactagtccatggggtcgcaaagggtcggacacgactgagcgactttcaccttcactttccgtactaatttagaacaatccccaaaggaaaaagtttaaaagctgggtgcctaagcatctgcaatctattctcattcataaatagagattgggcaagagagaacacctatgcatttattttttttttaagtttatcgacagacttcactgaacatggagtagacaggctgagtccccgtgtgtcccaccaaccagcctgcactccgccccccgggcagtgaccgccactcagctcttttcgggttaaacttccttgtgacagctgcgggacagtgcatactgacaggcacgttcttggtgaagtgcgggtgagttacagcgcttcgggcgcacagccaagtgacccagtttacagatacctactctttcagactcttttccattacaggtcactacaggacactgaatgcacttgtgaagacgttccgcggatcacagttgagatcccacatacatggggatcacagggcagtttctgtctgtcctagttcacctagtgtgaccatctatgtagtccacccgcgttgccgccgaggcaacagtccattctttacactgataacggtatttttaactgaggtcaccactccctccagatcccctcgtatccaccccaggagcctgtccgggccccacgctgcgctgagtcctcacatctgtctccccaggctcccctggactgtgcatctggctgccgaggacgctgacggtctggaggcatggggcgggggccctgggcaggtgtatcacaggacgcacctctacgggggtcggacagctggcacgacccgggctcgaggttgccccatgggcaggaagatcacagaggtaaggcgccaccatctccacacaaattaatcggaaattcccggagaacacacacgccctcactccaccacacaggtggcacagaagagggagcgggcacggcaggaggcccgaggggacggggcagacagctccccgaaggcacggcgaccgggcgcacgcgggcctcagcagcctcaccgcaggacacatggcccaggttcaggtcgtggggtgtctgccgggctcacaccgacactggcacgcctcggggcctccctcccatctcaccagcaggcagccacatcgaccaaaaactccagggaaaggaagctggctacctctctgaaagaggaggagattaggactcatcagagtaaacaaagtgagcccgagtttggcagacagggagaagagccggggctttgtcccaatcgcgcgtttggtgacgggcagctgcgtcccacggccgccactgctggccctcccctggggccccacgagcttcccacggcaagggtgcacgagcagcgcccgcgtccgcagagcccgcttctgcccccagacagacgggcgcacccccaggccctgccttcccaggaacggcgcgagcccagggggaaatggctgcttcggcccagggccagggccccggccccgaccgacccgcgagcagctttggaagcggcccggctcgggacaagtgacgactcacacggagagtgagcgctgctggctggctcttcctcgctgctgtctctgccaggagggagggaaagcgacaaaggggaggaacggctcagatacctcctccccgcggacaggcgcgggcagagagaagtggaggtgggtttgtgagtctctggcttggagtccaaggcaggctgcaggagggcaccgcacaacgcccatgctctggggaagtggcgcctccgtcccactcacccaccaggtcccggctgctcacagaggagagcgggctgccaggaggggaagctccgctcccggctcggggtccagggccccaggggcactggctcaccctggtccccaagcaaacccccctgcggccccccggtgccttgctggcaccccaaagctggtgtgtcctggggacggggcttcctctccctcgctccttgatcagccccttattccttcctcacacccaagcaggctcaggtccctgttccccttcacggggcaggacctgaaaggcgtttgcagcccctgcagggcacgtgggactgtgtacttctccaggctgaccctcagccacccctgctgccaggacgggtgtcaacatccaacggagtgaacgctccaactcccatgatgctaaacaaggtcccattccatgcgcagtctttttgtgtttgctttttaaatccaaaactagaatttgatattcagaattgagacatcactataaaatgcgagacaaattcgtactttttccaggccttttcttaaatctgctgcagctgtcatggaacttctttgggtttggatgagtttagcttagaagtggcagaggccgctgcaatcagggaggcgctgagctcagtcaatctaggagattccagaagcttccaaaggatgagggaggctccgctgcgaacagcacttcagccagttgtggaaggttccagagcaagacgctcaggtcacgtggggcaggcccagcagctcctgcccccgtccggcgtccaccaggacctgagcttccgcttcctatggcagagttttgtttccagcaagcatgtgtgtgtagaactcacttgaaagggatccacaacaattgtgaaggcagcagaggatgacatggctggatggcatcgctaactcagtggacatgatcttggacaaactctggaagacggtggggacaggaggcctggcacgctgcagaccatggggtcacgaagagttggacatgacttggcgacagaacaataaaacgggaaaactgcggatttagttgccataaaactggaaaatatagaccctggctttgtagaaaatatgggtgaagatgttatcttgatcagggattttaaccaatgtctgaaaatgaatgtaaaaactcatacctcgagccacctgtctgccccgtccaggtggagtccagctgccctctggggggtggggaggatacgtacccctccattgtgtggctgtccacccaggggtggcaggccatgcccacccctttccagggtagaaaggtctggattttgaccgtgaatacggggccaccttacacagacccctgtccccctctgctccagtgcggggttctggaaggaggagacacagggttgcccacctgtcaccgcaccacctccaccagccacacgggcaggtaccaggctgaaggcaaagtccagtggcccgtgtcttcctgaagggcgaaggcccggcacagcacagcccccactgggaggcacaacggcaggctcagagcccagccatcctcccgtggaggcggcccggccagcacacaggagccaggggacacatggctgctcggccccgtagctaggccagcctccctgcccacccccagcacctccagctgttccagaactggaaacactagttaagaagcactagcgtgatgttttctcagacaacatggaacgtgagaaaggctcttttcttctcacagataacacggatgtttgaaaccgtacccctcagtcagagcaggctgaccccgtaggaacacacatgggaaaggccttagagacagcatctccttcagaaccacagctgctgaggccgcgtccatgccaatcgggcaccgatccactcataacagggtccacatagcatggactggatgctggagtttccggtttagaaagtggagtgcctataaacgcgaagagaccctcgccccgagggcctcaggcactgagtccttggccccatggggagctcagagaaagcccagctgagaaccgagaaggccgcgactcggtccaggccagggccagcagccgtgtgagcatgacgctgggcagaggggccagccagtggagcacgaggcgctgagacgagagaggaaggggcgggaaggctggacgctgaggggggcagagcggggagcgtgcctgcccgggagtgtccctctgcagcacatcggggcagggatagacagatgtcccgggtctggggtctccccggctccatgcagcggctcatcacccaccaggccctgctgcccccctcccgcctccgggaccgctccagcccctccatgaaacccggcgttcccagggggcccctcaccggctagtgtggccccagccccctttccacgccaccaaaaatgccacagatgcgggggacgtaacagaaggagcccaatcccagaaggatggaagggcagacagacggctgcaccctgctcagaggccccagcggccctggtgggggtggctgaactgggcgccttgccggctgctcagaccccaggcagagtgtttcctgaaggcggggctccttgggacagaaaaaccccagtggggtgtcagcacttctaggccaggtctcctgcagcaccgagttcagactctcccctgcgatcctccagccctcacctgccttggtccaacacctaccccttccaaaagcctttaaggaccctgacggccaaaaccgtacccagcaaagaatcagctccccagggtgcagcatcgtctgggaggacggagacgcagggtcccacaaaagggcccgggtgacgggaaccccacgtgcacagcccccaggcagcagccgcctgcaccccgcccccactcagagcctcagaccccccgcgaggagcgcctctctgacctgtccctccgcggcagccacgccctctccctgtcacttagggaactgtgctcatgttcaggacctacagctaacaggcgaccacagacacccaccagccgccgacgcgatcctgacccgctgccccgtcttcatcctgtcaccgtcagtgactcgattccaacacgctctgagtgtccggcatggcaaaacacaaaggccctcatctccaactttggctaaacctcccagcgaaaacctctgccctccacggtctccgccctccccagtgccttcccaaattttctaaaagccctttctgtgtattagcacctaagaaagagatccattaccccgccttcctcccattccctgattctttcagtgagagtgaaataaagcagtcagctccccgggcccaggcgtgacgggtctggatgaaaagccacgtggagactgcaggtgttcaggcaaagcgctgggatgggcggcttttcaagcacaaaaagtggcaagcaggcttgcattttgtgtgtcagaccctggtgagggcggggccgtaagaaatagtcaatcagcccctgacttggatgaaatcaataaaacgtgaaaacgaggagcattaagaattctgaatcatgctgttcaacactagaggaactttcgctaaatacatctactgcaagaaatgggaacacgtcagaaagggcccttcgtacagcacaacatccagtagggctgtgctaagaacagagtctgtggaatcccttctaactccagcagcactgcgcaaatcttaccgaatcaacaggtcagcgcgaggtgtagctctaacaaacgcctggtttctacaaaggacatcgcaggaaaactcaaaacactgcacttaagaagaaataaacttggctgtgaatgcagacaagtcaaaacagaatctttagctcctggaacacaaggtcttcccttggcatcaacaccttgaacagctgcaccgtcagaagcaatcttctacaagaccgcctcggagttcaaaggtgaaaataactcgccatcagtcacaaaagtcccctcaacagacgaggcttgaagacagggcttaacaataacaaatcatcaacatccagcaaaggtacagggtcagagggcccatgggagccccaggagaacgaagcccccaggcagtgagcgccgaacagcctccatcgggaggctgacaccatctcacagaagtccttacaaacgttattgcaaacagagaaaaaagcagcagatgtagcatgtctatatatttttcttaatatcacctttgaccaagcctccctgctacccttcaaaagtatccagtatttgtagaagcaagagaatggctgtaacacggaacactgcttttcacgctaaaaccccaaaagcgctgaaggtgcgctgcagcctggaatgttccggttccgagtcaggatcgccccgtttgagcagcggcagcaggaaccctgtgccaaggaggagaaggaggagggctgggggacacacagcccagcagggtgagggggccgttggacggcggggcttctgacctcaccaacggccagagccgagagcccgacgcagctctgccgggagcctgccgggaccgagcgcacctcacgaccagtgtctgcatctaggagaagccaagtccatccccctcatttctgcctcttttgtggggggtgggggacatgaaggccacatgatgaggtctctctccatcacaccctgtttagcaccccctgtcacaggctgatacccctactcttaccaagtggggacgagaaaacccattttaaaacactgagctagagacagcaaggagagccaaccagtccatcctgaaggaaatcagtcctgaatgttcacaggaaggactgatgctgaagctgaaactccaacgctatggtcacctgatgtgaaaaactgactccttggaaaagaccctgatgctgggaaagattgaaggcaggaggagaaggggacaacagaggatgagatggttggatggcatcaccgactcgatggacatgagtctgagcaaactccaggagttggtgatggacagggaggcctggcgtgctgcagtccgtggggtcccaacgggtcggacacgactgagcgactgaactgaactgagagacgattcgacaaagttcacagtcattcgcctcatttgatttttttcttaatcattttccaaaaaaaatgttcacttttgcaccatggtctcgtgaaataagcaaataaagtggaagtgaaacaaaaggtttcaaccaagatctctcccgttgacctggccaggcccccagccagctctaaggattggcagagcgaagctcagagaagctcagaagcatgctcaagacacactggaaacgctgcaggagctaagaggttcaggtgcggcagggccctgctgcctccagccagcagagaacaggctcgcgtcctgggcggggggctggggccccttctccaggccagcagggtctcagagcagccgggggtgggcccgtgtggacctgggcgcagcagaccctcccggtttgggcccattcccgacgcccgcctctccaccccctccctcctctgccagcccaccttcacctgcaagcccttctatgccccacagggcagtggagctcctgccctgcaccctctgctcacacgtccattcctgggcccctacccccggcccatcccctctctccccatgaaccccgctgtgtcgacgtggcttcgtgcttccctccacctggcctggcccgggcaccccacataaatggtcgggatccactgctaaccggtccagggtgcccagcgtctgttcggcagaggggcccacgtccctcaagggcagacgaccaattctggttccaggatggtctctgagtgggcaacctggccttggcccaagccctggacggcagtcagtactggtttcctcgtggacagaacaggaatgactgtgttctatctcacttcctgggctccccaggtagtaccagtggaagagaaactccctgccaattcaggaagtgaaagagagggtgacttgatccctgggtcaggaagatccgctgggggaagaacgtggcaacccactccagtattcttgcctggagaatccccatgcacagaagagccaggcgtccacgggatgacatacagtcagactcgactgaacgacttagcacacacacatgcatctcacttgctgggctcatcgtggaaaaccatgaagtaaccattaagcaccgttcagaaccacatcgctattcattccaggcccctaagagcacagcaaggtctgactggcagtaagcaagtaaccagtgtcgatctattactattagaagcttgaaacatctatgttttttgcagacacagcagccccggcccttcacagcccagcatctggggtgggcgcccagcacccacctgtccacctgcccctctgctgggcgcctcaatcactgcccttctgtgccaccgacaagctgttcgctgcggtttctaatgatcccggctcagggctttctatgtcaaacacataccggggagttcattcttaagtttcaatatcattaatcatccaacattcagcatctcggaattcaggaatttgcatttctacaatggcggttttgaaaaaggggacatagatgcaaatgttgcacaaaccgtataagagttttcagagagctgccgaaataagccatcagcgcgccattgacagagattttctccactcttcataacgactgagcattcgtgatttttaaaagacaaaacacaatttgaggatttagaggagaaaggaggaaaaaaaaaaaaaggaggctgcaaaagaagccgttatgtctccatgatttccagaacaaaccttgactgattaagatcccggataatcatggcatggaggatccgggccgcgacaattcaggagccgtaactatgcgggcgggcgcccggaggagcctggggccgcacgcagctgggagacccgcaggccgtttctgcacccgccctggaggaagcagaagcaggtgctatgagcggcccatgagcgcctccttccccaaggtcagcctaaaacaatgagcctgcccctccccacaggacacctgcttccactggtctccagagccgtggtcttgctctgttggatcgcgagtctgtttctgcgttccacaggacactgggaacccgggctcctctccctgtgtccccagcctcggtcttgtccagaagcccctgggcccgccctccagcgcctggggactggccacgcctcccagatgcgtcctgaaaaagctctcccgcctcccctggctccctgagggtgtgagcacaggtctccgggcccgagcccccaggactccagggctgcccctgctggctgtacacctgtcccccgaaagccctgacctgggcctcctggggcctcgtccgcggcctttcccggggccccagctctccctgtggcccagcgcctcacacagggcccacgacccaccaccaggggctcaggatcaaagttccctttgtgttccctacaggtcctcaaaattcatttcctccccttgaaatatactcctgaaacattccacccttgcacagcacaatctaaaagacaggaaaatgcatccttctgaggccatttctaaattgaaatataatataaccctggtggccaaccgagtggaaagaatcaagactcaagatccaacagggcaagaccagggctcgggcttgggccggtggagctgagagcctcctcccgggacctgcaggatgagaacttcatggaggtcggaagaaatcaaactgtgtcgaaactcatcaatcaccaagttactgttgacgcagatattcagctgctttcatgtggacgaggcatttcagagtgacgagaatgctgacaaatcagagtgtggtccaaactaaaacacgggtctaaaatatacaggtttccctcaaaatggctcatcttgtgttttaacatatgcaagcctcttgccaagctcccaggagggccgggacacttgagtgactggatcccagtcctgctcggccagcttcctgtcgagagcgggcttcagatgcccgcaagcagtccagggcactgcacagcaggctccctaaggtttacagccgctccttcagacgccctctgggcagaaatgtcactgcgaggaagctgagctgctcggggtggggcgggggtggcaacaacgtggccgagggagagcctctggtcccgctctgagccaacccaggcccccacctcccagcacactcgggctacagggacgaccacagcctgtcgtctgaggaacacgaaggcagggaaagggggcagcctgtgcccggcccctcagtgtgggcaggggactcgccttccacgtggaggccccgcggcctcacagcgaccccccgccccgcacaggcgcgcaggaacgcgtgcagcgctggggcgggagaggcaccgcgtctcagcacctctcctcgctcctcctgctctcaaaggagagttctcgcagcctgagtcaggccgggccgcttgctcaggccgctcacagcattcgcaatcgttattcagagcaataaaagccccaccagtcagcagttttacgtcagagcgccagggccgggctctggcaaagtgcagaaggaacagcaataaaaccataatgcgcgcctcacccagcaccagagggggccagcgcgggggccggggagaagacctcccgtcaagtgaaaagctcgcttcctcaccggggcccagctggccggctccgcaggcctgacgggggggcccgcggcgcccgagggccacacaggctggcggggccacagccgggagggatgggggatagccagtgacgcggcggggccggggggcggccagacagacggacaccgcacggcccagggaggcagagacggacgtgggactcaagggaggctggggccgaagacgggacagggaaccccaggaggggccctgctctgaacagcaaaccgaacacgttcggtgttaactgtcctcctcccacaaatccactaaaacgacaagacacaaacaccaacgtgaaagattcacagcgagtctacacggtgggaacacagtggcgtcagctgacaagggacagggagggaccccctaggagatgcccgtctgggggatccaagtgatgggggaccaccacgagcgagcaggtgctcaccctggcaggccatgggcttgcggacggtggaggggggtgcgtgcagaccatggctcagcccagtccccagcttgcacccacccggggtggggaacgggggggtggaccgtagagcagctgggagagacccgccagcaagcccaccctcgcgtcggcagatgctactgccaggcgtcagctacccaggccgctgcaggactgccctgggaggaggggggcgtcagacagagaggaggatgggggccgggcccatccaccaagagggacacgcacagcagacaggacccgacctcagttaacagccacgggcaaggcctctgcccgagacgcgaggactctgggaaggagggaaaaggaacaccccgctagatctctgctgctcacggcgaccagcctcgaggaggaggtctgagatgcgcagatgctgctgctgctaagtcgcttttgttgtgtccgactctgtgcgaccccatagacggcagcccaccaggctcccccgtccctgggattctccaggcaagaacactggagtgggctgccatgtcctcctgcaatgcatgaaagtgaaaagtgaaagtgaaatcactcagtcatatctgactcttagtgaccccatggactgcagcccaccaggctcctccgtccacggcattttccaggcgagagcactggagataagtgggtggagaagcgttcgtcagccaagagaacccaaaggcagaaacacttttaggagactgataaattctggggcaaagaggcacgaaacagagagaaacacactgttattttgttaagagaccggggccagcaacacacattcattagattttaagcactgaaaaacaaagccacaaacgtcttattgtaaaaagaataccacaaactataatcataagagaaagtacacgtttctctagaaatcaaagagacaaagaagataaagctatgctgatgtaataatttaatcactgatttaagcatctgaagttattatgtatagataacacatagagaaaaatgcatacgtacactcctgtatataaatatacttgacctttgaacagcatgggattgaaccaccacacaatcttcttacagcagggttttttacggttactaccacgcacagcaccgcagcatctgtgactggctgaatccacagacttggattcacagatccagagtagccaacttccgatgcggggaccaactataacccacacatggattttccactgtgcggaggcttggcacccccgactcccaggctggcccagggtcaacggtacataacgctcatgcaggagaaaacttcacacacagtcctgatgcagacacatagacttcattagattaaagaaagagcgagaaaaataaatgcggggggggggaagcatttttttctcttcaaatgcctactggcatatatgagatttatgtctacagcagctcataaaaaatctagtatcacctcacactggtcagaatagccatcatcaaaaagtctatgaacaataaacgctggagagggtgtgaaaaaggcaaccctcctacactgtttgttggtgggaatgcaaattggtgcagtcagtatggagaacaatatagaggttccttaaaaactaaaatattgacataactactatatgacacggcaatctgtggacgtatatctagagaaaatcgtaacttggaaagataccagctccccagtgttcactgcagcacgactcaacagccagggcacgggagcagcccgagcgtccgtcagcagagggttggataaggcagatgcggggcacacagtcagtggggtatcactcagccactgaaaagaatgcagtgacgccattcgcagcggcaaggatggacctggagagtgtctcactaagtgaagctcagtcagagaaagacagacatcacatgaacttacttacaaagcaaaagcagactcacgaacttagaaaacacacttatagttaactaaggggaaaaaggtgggagggataaactaaagagtttgggattaacagacacacactactatacgtaaaatagataacaacaaggtccttctgcatagcacaggggaatctactcaaattctgtattaacctaagtgggaaacaatctgacaaaaaacagatatatgggtgtatatgtatatacacacacacacacacatatatataaaactaaatcagtttgtacaccaaattaacacaacactgtaaatcagctacactccaatataaaataaaacttttcaaaatgtgcaccctcatttatacaataatgcaaattcaaacaataaatgtcccctggcatgctgagaagaatgagacaaactgaatccacctagtgccttaaggggagaaactgagacagagtaaacaaagtttccagtgcaggtgcccgcccaccgagcaattctactgcctggaagtgatccagcagagatggtcacagaagtgtgcgaacaaaacgtgtgtacgataactgtctgaggatccggggctgttctaaaaactgctgcagccacataagtatctacccgtgagctaccaaaaatgagtcagggttacgtacctactgacatcaaaagatgctcataaggagctaaatgaaacaaacaaacaaacaaacaaaaaaacaaatgaaacacagaattccagagagggatgattaccctctattaaaacgtttctacacatacccttatcttcagacacaggaggaaggcaggctccccagctctgagtggaagggagtccacgtccacccacttcgacccagactgttaaattatattctacactcagtatcaatcaatacatgaacaatctaaatcaataaagccttcgtatctaaatacaagcgggaaccctgctcttggagcttcagacaactctgttcaggtcaggagaggacatgcaggggtccgatccccagggaggagagcagaccaagccccccactctcacccagtggggaccccagccacactgatggaggcccgagtggacgcaggacgacagtgtaagcggcccaggggccacgctgcagcggatggtgaggctggacgagccagggcttgctgccatggggcggccaggtgacttggtgacagggctggagaagcctgagcgctgtgtccccgcacgcttctgaacctgagagccgcacaaacgtgctccccgatcccacccggccccgagctctgtggccctggaccagtcacctcttcccagcaggtgggggacattcgggcctgtgaagactcgctgcgtgtagatgcaagcgccatgcctggtaaagccctgggcaccaggactgatgcccgcaggcgcccaccaccaaggggcaccaactgtgtccagcccaggggcagtccacccccacggcccccaaaatcaaagcagagggagaaggaagcagctctccagaccacacatggccttgcacccattgcctccctgaggtgccagggaggcgcgcgctgcccacatcggcacgtgggtcagggccaagcctggaccccgacccctgagaggccccactcatctttctgccgctgagatggagagctggctgcctgacccttggggccgacctaaaccagccacgctcgtgatcatgaacacagagacagacccaggacccaaccgccacgaggacccggggtctggcttacctggatggctttgtgagctcattgcgagcagcggcttctccttcaaaagattcaaaatggctcaaaacttccacgtaaacgagagctccaaggagcccggagtccgagcggcacatacaagtccagcaacgggcagggccggcccacagccaccgaagcacccgggtctcgctgcccacgtcgtgggcccagaaatccagaggagggtggggatctccaggggctcttaggagacaacctgtgtgggcagagaaacgggcggcttcggttaggaggtgcagccaggacccagtcatgtgcgtgctccccgccccttcggtggactgctaaacactcgcgtggactcccgcgtctagtcctacagactagagaagcccttacgtcccaacgagctcccccctgagagcccgttcataagtctgctttgttcataagcccaaccgagttcatctacatacccagccttacagataacgtcagacacgtgaacgaacttatgagacttgacatgggaacacacat

SEQ ID NO: 233 - DNA, 19249 bp, Hippotragus leucophaeus
  source 1..19249: mol_type = genomic DNA
aactgtctcaaaagcaatttttttcattctttcctccatagtaaggtgatgttcttaagtaaaccaatccattcacaaatgactctctgcatctgttctggtgtcttctgctacatcactgccacagtcatggcatgactgagaagagtttccttaaagtcattaattatttggataacctaaagctgccctattacctctgggctcttatcctctcctctttacacagtcagaaagtgaaagtgaagtcgctcagtcatgcccaactctttgcgacccgatggacagtagcctgcaccaagctcctccgtccatgggattttccaggcaagagtactggagtgggttgccatttatacagtcaagtccacataaaataggaagctaaagatcctcttgtcaatccatatccaagtcttccaccaccataaactccttttccttctccataaccagggctaactcccaaattgccacttcctggtcatcctccatacctattataaccatgaccaagtccactgaccacttctcaatccatcagatcgtcctccaaagctacttcctcgtcctgaccctggtccaacatttccatcatcaccaggagaatctccaaaaccagctttgtctccctctccacttctagaactctggacttgttgccttttaggtcgagaaaaggcctttcttacttctgcatgatggccgttgatagtatggtttttctgcaacacaatcttatccacgggatcatggtcatcaaaagtcacaaatgcaaagcctctttttcttccagactctctatcagtaattatctcaatggcatcgatttttccatatttctcaaagtaatctctaagatgatgttcctcagtatcttcaattccaccaacaaacagcttcttcacagttaggaaaacccctcgctgcccagattcctctcttgggacagcacgtttgggggcaattactttcccatcaatagaatgaggtctggcagccatggcagcatccgcttcagccatggatgaaaaggtgacaaaaccaaaccctcttgatcttttgcttgcagggtcccttatgatctcacagcttataagctttccccactgcttgtagtaattcctcagactttcttctgtggtttcagagctcaagccaccaataaagagtttacggaattgttcttgttccttcttcctccaagaaataacagtttggaaactttgctcgatctcggactccatcactgcagccattttcctggtgagggaaggtaagggagatgagggagatctctgggaaagctcagcaacctgactgttcacaatgctgaggtaacaagaaactagaacctaactcaccccaggtctgaggggagaacattctaagagcagcaccttcacaaccacctggtgccaccctttgaaattcttgagcacctttcaattttcctgcaaaacatcatttgcatgaatgatttttcctgatttaggaatccaaattaatgttacactttctattatttttttcaattttagattgtacttatattactatcttttatttcatactgtttttctcactaaattggatatccaatgaagacaagattgacctagactttaatgtttaacactgacatatagcaacatcaatatgtttagttcttaggcaatgctcagaattttgagcgaaaactatccacaccaaaaaagaaaaattttctacattttcaaataaattcactatagttaagcactgataatctcttgtggtggactggcaatcatatcttttcaaatcatttttctctgtgtaatctattttaagactcatgttgatgtatggcaaaaccaatacaatattgtaaagtaattaatctccaattaaaataaataaatttatattaaaacaataaaaacacacacaaaggaaaaaaaaggactctagccacaataatctctttaagatgtaaagctaatcagtgtacactttctttgaaatttctgtcacattggtatttttaaggggagaaaaaaatcaaattccattcctgctgttctgccataattattaacactgcctcttaaacactcaagatgtttgagtctggagggaaagttagttgatcctctcatttacagaacgcctaatattatgccaagttgtggactaaaacccaggattcgtaattccacttaacaaagttactgccccaatttactttaatcctgatgacatagaagtgttaatagactaaagaatgtctactctagtgcaaggtatgaataaggattctgacaatcagtaaggccaatgcagagataggagacatagagcaagagcagaaaggcaaaagggagggagaattaactacaatttcagatgatgatgagattatgggaagtctgactcctgatatctgagcaaagaagaaaaggatgggggtagagttccctgggggtccagtgtttaggactcatcactttgactgctgtggcctggattcaatacctggttggggaactaagataccaaaacataaagggaagaaaggaaaactgggaaaaaaacattgtaactaaggagttttgagatagagagaacaatttatgcaacacagggataaacactactttgctttccagggacgttgattttaaaacctaaaatgttggggcttgcctggtggtccaggggttatgaatactcctgccaatggaggggacacaggtttgatccatagcctgggaagattcctcatgccatggagcaactgagcccacaccctagagcccttgagctacaactactgaaccccatataccttagagcccatgctctgcaacaagaaaagcacatgcactgcaactagagaagggctgaaagtaacgaagacccagcacagtcataataaaaattagaatctaaaatctggactgttactcccaagaaagtctcatatacaaagatatgtaaaaccatgaatcctaaataaaaataaaaaaactaaaatctggactactatcccaagaaagtttcatatacgaaggtatataaaactatttcttaatactgctgttgctgctgctaagtcgcttcagtcatgtccaactctgtgcgaccccatagacggcagcctaccaggctcctccgtccttgggattccccaggcaagaatactggagtgggttgccatttccttctccaatgcatgaaagtgaaaagtgaaaagtgaaattgaagtcgctcagtcatgtccgactcttagcaaccccatggactgcagcctaccaggctcctccatccatgggattttccaggcaagagtactggagtggggtgccattgccttctccgccttcttaatactaacaccaaggaaataacttcaataaggtagcttctttttttaagagtaaaatctgctaacttaagaagagattttaccaaagaaaaaaggatacaaaaggacattcttgccatcaataaaaatgccacacttaccggaacagtctgatttgtgaatactggttctcccagttccaagagctgtcctgtgacccacacctgagaaggcaaccagtagcttgctggagatagtagcgacttctgcctctgattacccttttatagactaacagagtggataatccaatcggtagataacccagacacaccctattttagattaatgagattgaagagattctaaaagaaaaaatatggggctattgatatttgcataatgtcctagatgaaaaaaatgtaatatgtttgtacatggggagtgttacttagagtttatgtcaacattttatgtttcctttttctcccgctatggaatatattctgcaaagataagaatggaagcttcttgatataaaacttttcagataagatatgctttcataggaaaaaatagagactgtttaatgtttttcaataaaaaatgtcaaaaaacttattgacaagactataatatctatatcatacagccactacaacaaaattagtgttttgggcatttacatttcacctaattactgaaatttgaaatgatcacaactgtattgctttttccttactctttgacctaaatagtctctttactcttttcacttcacttttattattccaggattccctaataaatttgttaatcctaatcatatacaaatctgggtataattacatttgtgattaaattatgaatctttcacttaatagtctaatacacttaaagtctaatactttcatcgcctttgccaaagtctaaaaccttagaacactttaaattccattacactttcctgagtgttttattatttctgcaatgcattttaattctatctatgttttaatttccatgagatgttatctgttactgctgtttagtcagtaagtcatgtctgactctttagcagagatataactagttctttataaaacaaaattaaatttatatttatttcctaatcattgtttcctttcctcctcattccatcctgcattcctaattttcaatctgggattattttccttggggcttaatatctcactctagtattttgtctaattcaaagctgttaacaatgaaatatttcactttcagtttttaaagacatctttacttggggcaacattgatgcttgatatagaattctggtttgatatgataattatcacactttaaaaatagtgttctgttagtacttatcttattttgtttcaatatcagtgtcaaaaattaagctttttcttgcatgtttggcttctgtattctctacagattcattgggttaattttggcttttagaccacaggatagcttttcattgtttcttctgcatatacttgtgtaagctaatgttgctgcattatgtaggtggatgcctttcaccaatatgaaatgtgcttttgtgactgaaagtggggtccagctatttaccattcaaaagccactaaagaggcaaggttggtagaaaggaaaatttgctttattatgaataccagaaatgggggtgggggagagaggacgcctatccaaaggccgacttctgacctcatactcagggagtactagcttttattgacagagggaggctacatgcagaaacagcacggtcagctctgacagtcatcttgaaattggtcatgcagtagtgtgaccagtgtcatcttgattgttttaagttgttcagttcagttcagttgctcagtttgtccgactctttgcaaccccatgaactgcagcagccaggcctctctgtccatcaccaactcctggagttcacccaaacccatgtccattacgtcggtgatgccatccaacaatctcatcctccatcgtccccttctcctcctgccctcaatctttcccagcatcagggtcttttccaatgagtcagctctttgcatcaggtggccaaagtattggagtttcagcttcagcatcagtccttccaatgaacacccaggactgatctcctttaggatggactggttggatctccttgaactccaagggactctcaagagtcttctccaacactacagttcaaaagcatcaattcttgagtgctttctttatagtccaactctcatatccatacatgaccactggaaaaaccatagccttgactagatggacggttgttgacaaggtaatgtctctgcttttaaatatgctatctaggttggtcataactttcctttcaaggagtaagcatcttttaatttcatggctgcaatcaccatctgcagtgattttggagccccccaaaataaagtcaaccagtttacactgtttccccatctatttggttttaagtagaattagtctttatccctggagaaggcaatggcaccccactccagtactcttgtctggaaaatcctgtggacggaggaggctgtaggctgcagtccatggggtcgctaagagtcagacatgactgagcgacttcactttcacttttcactttcatgcactggaaaagaaaatggcaacccacttcagtattcttgtctggagagtcccagggatgagggggcctggtgggctgccgtctatggggtcgcacacagtcggagacgactgaagcgatttagcagtctgtatcttcagagttggtttgttcccatttccttgaggcaaattcccagaattatgtcagattatgtcttggctatagttaacttctttcacatgttgaaagtttcagtatctagctcagagggtgcattcaaaatgtatttatagaacttgaggaggaattaaaagactcccttgtagctcagtcagtaaagaatctgcctgcagtgcaagagacccgggttcaatccctgggtcggaaagatcccctgcagaaggaaatggcaacccactccagcattcttgcccagaaaatcccacggacagaggagcctggtgggctgcagttcatggggtcgcaaagagtcgggcatgactgaacgattaacacttacttatttacttgcttaatgactaaactaaattacttattcttgttggactcttttcctttattcctgcattttctcatttctctgcttaaacttatttttgactaaaatttttccacagacaaaaggcaacctgaggacatggggggaatggtgaagcaccataaggtcttgctctgtttcaatatcaatttttccatactttctctctgttccccttttaatcatatctctcttccattttaagtctgtattatttattatttttcactctcagtttctgttgaaatatttgctctgccttactctttagtaatccaggtaaaaagtgtagaatcagtatcttcttaattaccaaaatttttagtttcatttctagttcagttcagttcagtcgctcagtcgtgtccgactctttgtgaccccatgaatcacagcatgccaggtctccctgtccatcactaactcccggaattcactcagactcacgtccattgagtcagtgatgccatccagccatctcatcctctgtcatccctttctcctccagctctcaatccctcccagcatcagagtcttttccaatgagtcaattcttcgcatgaggtggccaaagtattggagtttcagcttcagcattagtccttccaatgaaaacccaggattgatctcctttagaatggactggttggatttgcagtccaagggactctcaagagtcttctccaacaccacacttcaaaagcatcaattcttcggcactcagccttcttcacagtccaactctcacatccatacatgaccaatggaaaaactgtagccttgattagacggaccttagtcggcaaagtaatgtctctgcttttgaatatgctatctaggttggtcataactttccttccaaggagtaagcatcttttaatttcatggctgcaatcaccatctgcagtgattttggagccccccaaaataaagtctgatgctatttccactgtttccccatctatttcccatgaagtgatgggaccagatgccatgatcttcgttttctgaatgttgagctttaagccaactttttcactttccactttcactttcatcaagaggctttttagttcctcttcactttctgccataagggtggtgtcatctgcatatgtgaggttattgatatttctcctggcaatcttgattccagcttgtgtttcttccagtccgacagacagaataaaaaactttgatttttaaaaaggaacagttttacaataaggccatatggtgaaagaaaaatttcactacttctctactgacttgaataagctctatgataatcttagtttgacctcataggttctaacactctcctgccctacagaggaggaactagtaatgtaagtctgaggtctactcagagaagagggtttttttctcctcccccactttcctttgattacaaaattgtggcccacttaatccttggggcagagctccttgcctgcttctttgcattgcttataagcatcctatattaataaatctatttattgcctatcactttgcctcttgctgttcctcttcctgagttccttctgcactaagatatgaagaatctgagcctcagtaagaacagacaccaggtgagtcattctaattaaaagaccatgggttcgagttccaatatgaggtacacagtttcaggtgtgttcttgagggtgtttctggaaaagactagcacttgattccatagaccaagtaaataaatccactttcatgaatgtgagtgggtgttttgctatttggtcagggcccaaatggaaaaaagtgaaggaaggattaatccattctccctcactggcacatccatattttcctgcctctggacttcagaactcctggttcccaagcatttggaattggaatcaagtatactgctgacttttctggctttctagtttggagatggtagtttctgggactttttcatctatcaagctactgagtcaattcttacaataaattttcatatatatagttctggtaagctgttttatgttttaaaacataaaacaaaatagatttatgttttaaatggatcattgtgcctggaatctatacctgaattaatggagaaaggattaggaatcttaaactgtcattgctaatctattagaggaggtcattcaaaagatgacatcttgcaaaagtatggttagtggatggattttcaatataccaaaaagtaaagatttaaaaatttaccaatttgtaaattggcctgggtttggatagtaattatcagatttccctctttgtctcacaccagctttgtaatgtccctaaatccttttctcaatgtataatacctgtaccagcattatcaacatcaactaggaacctcttagaaatgaaaattctccattcccacctaagacctatgtggactgaagtccagaaatctgagttttagaaaccctgcagctgattgtgatggcacgcttatccaggacagaaaaatgatagaatatccgaataagctgagacattcaccatggataatagtgtttgtccctcagtttacttaaactacatattttaatttcaaaaagaaagctcaagaaatatgcctcgacttcacagaggaaacaatgagactatgaaataggtcaagcagaaaactggcttcagctctagctaccctgtaaggcttgtatctgcattgtatctgaaattacatgttccagaggtcagtgacaagaataatttcccaggatgacagtgagttcaggaacagccaacaggagatcaccttggagatcaagagacttcaaggactacaggttgcagcagtgaaggagaacttgtatgtcctttgtattttacaaataccttaacaacagttgcaccaagtagtcctgataaatcctttggccagtataagggtggatggaggtctgcatactagtcctaaaaaagcccaagaatgtccatatctatcatagatgagcccagaaacagaccaggttctcttgcaacctctctttaggaatcaggaaaattctggagatgacaagaaacagaagcagactgtgaagaaagcagaggagagactgccactagccttgaggacagatgggattgccagggaagaagagaagaatatccaagaaagaccctagaaaacacagtaagaaaggcaacattcatgctgaagaaaaggaaagtggtacagaccttgagcaattcatcttatgatgtatctgacctttcatcagctactccttgcaagtccatcatcatattcatgtttcatagtgaaaggctgttgctgaaccatgaaagattccaggattcttggcctccagaggagaagaattcaatctgaggccagagatgaggcttgatagctcagagcttttgtgtaataaagtcttattaaagtataaaagagatagagaaagcttctgacacagacatcagaagggggatggagagtgcccccctcactagtgttagcaagggagttatatactttttaattagttattgcaatgaatcaaaagaatgtctggaggttgtaaagatcttactagacccactcccataatttacattttaagataacaggattagccagaatgttttcaggaaggagaaactgtcctcaagcaggatacattgttgttatataatccttagcaccagtttaaactgagttgtttgctgtgtaatcatcagttccatgcttaaagacaaaaacgttttatgtgactaagactaaggaatgtagaggaaaaaaagaaatttgtccttttctcctccttgagaatcccacacccctctctctttagggaccccccagacttcttatcaatctgcctaggcattgactcactcgacagaaaactcaatttacattttccttgattggttttcatttttatattaagtcaataggataattgaggctgagattttacttactgatttgaatttacatttctttcctctagtacttacactcaaagaagagatatctactcaagtcagatttttcctttctgttaatgctgtattaaatctgatttcatatattattatcttcttaataataattggttttgcttgtaaatttcagtaaaatacatcaacctttcctttatttgtcatagctttattcatatataggtaatttttatattactgggggctgactgtggctcagatcatgaactccttattgccaacttcagacttaaattgaagaaagtggggaaaaccactagaccattcaggtatgacttaaatcaaatcccttatgattatacagtggaagtgagaaatagatttaagggactagatctgatagacagagtgcctgatgaactatggagagaggttcatggcattgttcatgacagggatcaagaccatccccacggaaaagaaattcaaaaaagcaaaatggctgtctggggaggccttacaaatagctgtgaaaagaagagaagtgaaaagcaaaggagaaaaggaaagatataagcatctgaaggcagagttccaaagaatagcaaggagagataagaaagccttcctcagcatcaaggcaaaaaaatagaggaaaccaacagaatgggaaagactagagatctcttcaagaaaattagagacaccaagggaacatttcatgcaaagatgggctcgataaaggagagaaatggtatggacctagcagaagaagaagatattaagaagaggtggcaagaatacacagaagaactgtaccaaaaagatcttcacgacacagataatcacgatggtgtgatcactcatctagagccagacatcctggaatgtgaagtcaagtgggccttagaagtcatcactatgaacacagctagtggaggtgatggaattccagttgagctatttcaaatcctgaaagatgatgctgtgaaagtgctgcactcgatatgccagcaaatttggaaaactcagcagtggccacaggactggaaaaggtcagttttcattccaatcccaaagaaaggcaatgtcaaagaatgctcaaactaccacataattgcactcttctcacacgctagtaaagtaatgctcaaaattctccaagccaggcttcagcagtacgtgaactgtgaactttcagatgttcaagctggttttagaaaaggcagaggaaccagagaccaagttgccaacacccgctggatcatggaaaaagcaagagagttccagaaaacatctatttcagctttattgactaggccaaagcctttgactgtgtggatcacaataaactgtggaaaattctgaaagacatgggcataccagaccacctgacctccctcttgagaaacctatatgcaggtcaggaagcaatagttagaactggatatggaacaagagactggttccaaataggaaaaggagtacgtcaagactgtatattgtcaccctgcttatttaacttctatgcagagtacatcatgagaaatgctgggctggaagaagcacaggctggaatcaagattgctgggagaaatatcaataacctcagatatgcagatgacaccacccttatggcagaaagtgaagaggaacttaaaagcctcttgatgaaagtgaaagaggagcgtgaaaaagttggcttaaagctcaacattcagaaaacgaagatcatggcatccagtcccaacacttcatgggaaacagatggggaaacagtggaaacagtgtcagactttatttttgtgggctcccaaatcactgcagatggtgactgcagccatgaaattaaaagacacttactccttggaaggaaagttatgaccaacctagatagcatattgaaaagcagagatattacttcgccaacaagggtccgtgtaatcaaagctatggtttttccagtagtcatgcatggatgtgagagttggactgtgaagaaagctgagtgccgaagaattgatgcttttgaactgtagtgttggagaagactcttgagagtcccttggactgcaaggagatccaaccagtccatcctaaaagagaccagtcctgggtgttcattggaagaactgatgctgaagctgaaactccaatactttgaccacctcatgcgaagagttgactcattggaaaagactctgatgctgtgagggattgggggcagaaggagaaggggacaacagaggatcgggtggctggatggcatcaccgacttgatggacatgagtttgagtgaactttgggagttggtgatggacagggaggcctggtgtgctgtgatttatggggttgcaaagagttgcacaggactgagcgactgaactgaactgaattatagatacatatatgaccaatgtggaaggactgtgcatccattgtgcctaattctgtggacttgagtgaaacatatggtgtatctcaataaaatataaccatatatcttctgcttttctattcatgacctgcatctgaaggacagttatcttccagggtagaatcatgggttcgtctgcatctcctggaggtcccatttctgttttcaccagaagcatttcatgaacggcttgggccactgcatacacagcattataggtgaaataactggattcagacaaggtcatcatgtcagcagagaaggcgatggcaccccactccagtacgcttggaaggtcccaaggacggaggagagtggtaggctgcagtccatgaggtcgcaaagagtcagacaccgctgaacgacttcactttcatgcattggagaaggaaatggcaacccactccaacgttcttgcttggagaaacccagggatggtggagtctggtgggcggccatctatggggtcgcacagagtcagacacgactgaagcaacttagcaaacacatcatcatgtcagaattcccttgcataaacactatagaaggattgggtgggcagtagaagatatttccaaattgtgatccagcaggtgaatatgtaataatttgaagccacacattcagttcagttcagtctctcagtcatgtctgactctgtgaccccatgaattgcagcacgtcaggccgccctgtccatcaccaactcccggagttcactcaaactcacatccatcgagtcagtgatgccatccagccatctcatcctctgttgtccccttttcctcctgcccccaatccctcccagcatcagagtcttttccaatgagtcaacttttcgcatggggtggccaaagtactggagtttcagcttcagcatcattccttctaaagaacactcaggactgatctccttcagaatggactggttggatctccttgcagtccacgggactctcaagagtcttctccaacaccacacttcaaaagcatcaattcttcagcactcagctttcttcacagtccaactctcacatccatacatgaccaatggaaaatccatagccttgattagatggacctttgtcagtaaagtaatatctctgcttttcaatatgctatctaggttggtcataacttttcttccaaggagtaagcatcttttaatttcatggctgcagacaccatctgcagtgacttgggagcccacaaaaataaagtctgacactgtttccactgtttccccatctgtttcccatgaagtgatgggaccagatgccatgatctttattttctgagtgttgagctttaagccaactttttcactctcctctttcactttcatcaagaggctttttagctcctcttcactttctgccataagggtggtgtcatctgcatatctgaggttattgatatttccccctgcaatcttgattccagcttgtgcttcttccagcccagcatttctcatgatgtactctgcatagaagttaaataagcagggtgacaatatacagtcttgacgtactccttttcctatttggaaccagtctcttgttccatgtccagttctaactgttgcttcctgacctgcatataggtttctcaagagggaggtcaggtggtctggtatgcccatgtctttcagaattttccatagtttattgtgatccacacagtcaaaggctttggcctagtcaataaagcagaagtagatgttttcctggaactctcttgctttttccatgatccagcagatattggcaatttgatctctggttcctctgccttttctaaaaccagcttgaacatctggaagttcacggttcacttactgcttaagtctggcttggtgaattttgcgcattagtttactagcgtgtgagatgagtgcaattgtgcggtagtttgagcattctttgacattgcctttctttgggattggaatgaaaactgaccttttccagtcctgtggccactgctgagttttccaaatttgctggcatattgagtgtagcactttcacagttacacattactgaagtaaaaatcttccgggtattgggaaggattaactgtcttgagcaagtgtttaaaacttcgtatgtccctcttctgaagtgagaaggagaaacctccatggaaagagtgccttatgcacttcatctcagtcaacatactatcttcctttgctgccataatccgcactctgtccgaggttaaatagagtcttgctcccctgtctatggaaatgaagcatcccatatcaccatgtagtatatacacatttacagatgaaattctgggcatcttcagtgaatgtacatcagttaattgatacaattccttaatggtagggagcttttcagtaaaagccacacatatgcttttctttaccatctctgctttcaggttccagagtaacctgcttcccgagtaacctgcttccctttcttatcttcagagaaaaaatagtgccaagcatatccagtcaagatgcaagaacagcctaatcattccatggattagatagctgtcctccctggccatctgataaatggatggaaattagtctttatcactcagtgaagaattaaaaggaccatatgtcatctgagcaagaaaagatgaacatgatttttctaacccatgcttagtgggtttggggctgtcttccttgaggaaagggtgaaccagtcctctctgctatagggagagtgaccaaattatttcctgaagggaaagagacccagtggacattctatagttcttatttcattctgggcacacagaagactgtgtttcctagatccctcactcttggaaaagacatgtagtttcttctgaaaaaatgatataaatatggtacaaaaaaccaaaagagaatgtgtgagattcccatgagctttttatctccttcaatggcagctgacatttcagatggtgcacccagaataatgtagtatttccatcaactttgccccaggttgcttgtgaagaagagattacttctacctagcaactaatgtttcatgtaaatgctgagaataagtaaatcttgtcttattaaatcttcgtgatggattaaatgtactaccacagcattacctacattatcctagagattacaatgccctaccctttcatgctttctttaaaaatattccatggacaacattcttctattctatgctgctttgcttagaagtaatgtctcctgtttgctgctggtcagattggtccttggaaagagatcctaagatggacagacatgtgtggaaagtttaatggagtatcctccttatatgcctgggggacaggagcaaggcagaaatggggaaaagatctgctgaaccacaagacaattacaactgaatctcagtcagtcctcagggctctgggatgacccttcagggttgtccaatattgaggctagggaaccaggcttcttattactatgtctctaagaccctggcttctggctgttacttgagagggtcctgtcctagagtgaggggtttccctatgctgtgagtgtttcctatgatgtaaataatagtaaaccatcacactcaatgttccctggaacagtgggatgggtgccttgaccctgtgcatgaacttggactttaaagtactgactgatcatttccatcacctcccatccctgggaataaagcaccatctgaagtctctagaatgtgtttataactcagtggaatgcatacacacaacctctacattatttgtttatgggatgtgggtgaaagacaccaggaaagagactttgtttctcaccagaactcagacccactcacctgtggcattttgtacagctccagaagtgttccaatcttggctggaaatactgatgcagttcttgtaactacggccaaatatttcctctctctggcagttgtagttaggggcagtctgtttcccttcagagagccaaaacagggcaccttccagagtccttttgtcactttcaagggcactgtagagaccataacccaagggcatgttgggaaggagatgagagttcttgctgatctcctcaatggcaaagcgaaaagccaggacatattgataattcctgagaaaccacctaaacagaggggacagtattagacagaatggtcatgtaatacaggaatatatcccaagccaagggaagggaagggcttaaacccagctttcccattcagagattcttctgatttcttggtatgaataaggtctcaggggtctggaggacactggcaaggctcctgttaggaccaaacagaagccaggaagccaggacagacactcgggcaggctaggcccgagaaaagctgaggctctgggaactcccgcaggcagtgtagctcgaccaatcagaaaaatccccatagcccccgcctgcgccagacccgagccaatccagatagggatgcgaggtttaaaagtcccgcgcacgcgtatggtttaaccaatcagctatgctgttacagaaacaaccgtctgtataaaagtatatgtgattcagagctcagggcctttgtcggattccactgtgctggatgaaacctgggccctggctcgagctggtaataaacccctttatgcttttgcattgctgtggacgtcttattctctcagttttggggacttggactctgggcacaacatttgggggctcgtccgggatccctttaactgggaagaataacactctcccggtagaaggggtttcctcacttggaggaaagctatctgaacaccggtgttaagtctggttagccagcataagaccgaggcccagcttacgtgctggaaggcagctggctctggtgagaagagagctcttgtcaggcttaatcaggggcgaattagtcgtcttagccagcgtaaggccgaggcccggcatcgtgctgggaaggcggctggctctgtgaacgccttgttggtaagataacctagagggatagggttcagggggcccaggaagacctagtactgttctcggccgaggtttgtctctcctctgtttgtcgcatctttgtgtgtgccggcgttgtcactgctctctgtgtgttcgtctggtctcctgtgttctatcctgtaatcatggggcaagagacttccactctgttgttccttacgactgaccatttttctgattttaagtctagagcacaggatctatcggtgctggtgaagaagaacaaattaataacttttttgcagcacagaatggccgaccttccatgtaggctggccttcagaaggcacctttgacttgggaactatacaccaagtccgagatatcgtcttccgaccgtggatcggacaccctgaccaagccccccctccttgggtaaaaccttttttgcctcaacagggattttctacccctcaggtgttggcgacacatgtaagaaaaaaaacccaaagaatctcaaggagcctgaaccaacggcgccgctatataccccatcttacaagggaaattgttaggagaagcacactgattaaaaccgccccgccctggccaggcaccatagtaactatttgcatgagttgttttaagcctccgccaaccggaagagttcggaaaaggtttagaggagacaccgcctgtacattgcgagccacgcggcagagcagttctcctgggtttccttaccctgctgcgctccacccgggtgccctttcccaataaaatctcttgctttgtcagcacatatgtctcctcggacaattcatttccgagtgttaggcaagagcccagtttcgggccgtggaaggggtccctcttcctgcaacaaatggtgactctggtgggattcttcttcaccgagactgacatcctgaccactcggggtactcaggggccagcttgcctgccaatggaccagacccagcggccgcaactgggacacttttgtccctggtctcttcctgacgcggacaactggccagagtgccccgaccggtaagaaacaagagacttcattgatctccctccccttccctctctgtctcctctccttaacccttcctatccttctctttttttctagtcccctggtcctagacgcaaaaatctggtcaaagggccctcagccagagctgaggattggagactgatcacttcctcttggcagaaaactcaaattctggttctgatttctggtggggccgagttccagtcgtcccttctctggaagcccagggaaaagtcccgtaaggcctgggtatctgtaggtggcaggagatgtctgtaaggccaccccttttgcgccccccccacctcctctccctttttcaacctggcttcctttcctcccttgaaatctttgatgttag

SEQ ID NO: 234 - DNA, 13943 bp, Hippotragus leucophaeus
  source 1..13943: mol_type = genomic DNA
gccttctctgattcttcccttcgtgtgcccacagtgtcctccaccgacttggaccacagacgcatgactggttagagcccaagtttccgaatctgggggcgcaacaaaattacctgcggatttatttacaaaacaaaaagcagatctctggactcagacctgttaaagaagtttgagaagactactatttccagcaagctccaggctgtcttacctctcaggagtgggtcacagaagagctcttggaaccaggcgaacctgcatcgacctgttccaccgatcaacctattctgaaaaactgaaagctactcaaggttgatcccagagccatagtgattccagaggtagtagccacagtgttgagttcccgtggggggcagcggaggctctcaccccagggtcaggacaggtcaggttcaagttctcatcatagcgtggggacccagttcagtccctgctagccccctgagatctctctcaccctcctctgcatcggaaaaatggctgaagctagtaagcccgtgatgaagaaagcttcacaatctgttccttcggagagcagtaagagagaaaaagaacaattccgtaaactctttatcggtgacttgagctctgagaccacagaagaaagtctgtggaactattaccagcagtggggatatcttacagactgtgtgttaataagggaccctgccagccaaaaatcaagaagatttgggttcatcacattttcttccatggctgagctggatgccgccatggcggccagacctcatttcattgatgggaagatggttacgcccaaacgtgctgtcccaagagaggaccatggaaagctgggggctctcgtcactgtgaagacgctgtttgtcaaaggaatcacagaagacacgaaggaatgtcatcttagagattactttgagaagtacggaaaaatcagcgccattgagatagttactgatggacagtctggcaagaaaagaggcttcggatttattacttttgaggaccatgatcccgtggataagatcatgttgcagaaaaatcataccatcgatggtcatcatgcagaagtaagaaaggccttgtctagacaagagaggcaagaaggccagcatttgagaagtcgaggaggaggtgatgttggtttggggtattttcatggtgttgggggaaatgtgggagcaggacgaggaaggaacttcagaggaggagccggtgggtatggaagaggatgtcagtttggggatggctctcacgggtacggaggaagagctggaggtggcagttgggggcttaggcctggttacgggggaggacgaggagggtgtggtggtggagggtctgcagacggctaccaggatgagggcttcagagcccgtcatgacagctatggaggaggaagttatacaagtcgcagtttcagtgattcgggcagtcagaggcagaaaccttccaagtacgatttactgaagagtggaaagttgagagatagcaggaacacgggcgggtcgtgtactggaggaaaccacggcccaggaggcagtagaggacgtgggggttgtggagggacaaggcggggggggccttctcagtggccgtgggcttgactgtatacagaggagggaattaccgcccagaggggagagaggagctgcagatgatcaaaataacagtgctaaggaaacactcacctcagtcacgcatagatgctcagcgccacggcagaagacacctgagctagtaccgaagccactttgtgagtgggctcagtcatgtacgagcactacttcctgtggaggaaagacttaaagaaaatgcttctgaggtggttttttagcttttgaaatgttctgcctttctagcggtctctggaagagtgtagaatcatcccttctttgataatgtcccatttccaagtttcggttgacccgggaaacctttttcaagatttttctcgaagttttgaaaaactgttagccagaatcaagggatactaagacataacatcattcttcttgagaaatgtatttcatgtgtagagttaagaagctgttgtgcatttaagatttaataaaataattctaaaagtaaaacagtagtggcttgtcctctttgaatgttttgcatttttaccttttaaattttttcctgttttaggatatcaaaatttgaactgtgcagtgtaatgatatgacttacatatattatcaaatgattaccaaaaaactttttttcttatgatgatgaatattcttaggacttactcccttaacaaattttgtaatatcctacagctgtgctaattttggtcaccttgttcattatagcttttttcttttttcattatagcttttaaaatgttgaataacatagcatgaacttattggtcatttgtatatattttttggataaatgtctattcagttccttggtccataccacaatttggtatttgctattgtggtgtatgagtttttgttatacattacatgttttgtgtttatcttataactggaagcttgtacctttcgacaacctttatcctgtatttccttccaccagttctctgcccttggaaaccacaaacatgatttttttttctgagtttaatctttttctttttttttttttggatttcacaaataaatatggtcataccaaaagaaaggtttggggaggacagagatgtgagtgagcaggcggtttgccatgtgaagtcaatggatatcgtcctccagttggcttttatgcacttatttccttataagtccctactggaccatgagcatcctagagggcaggtccatttgatacacacctggctcatgcataggaaggcatgggaaatgggccagatgagaaggaaagagagaagaaaacacacacacaaataacagaggccagggcccaggagcccagggtgctccacgggtctgagagcctctggcagggacaaggtggaggtcatggggccagtccactcacagtgcgcctccagcaacccctcagcggtctgcccagcagtgcctcaagtgatacatctttcttctcgtttctcttttgtttaaaaaatcaatacaccattcatgtaggccatggtgtcagatcagagacctgtactttggaagcaaccattttggtgccatttctattttccataattgtttccttgttgctctctgtttgtcaggagggaccggcctttgaaaaatgccagcttgtctgctgggcttaggggagctggtgagggcttccaagggcacaggcaagggtgggagaggagctggaatgaggcatcccagggagcagggggcctcttttaagaccatggggtgtggagggctcttaggcttcttttccatcagtccctctctaccagagaggaaagtcagtgatttttgtttaaagatttatttatttattggctgtgccaggtcttctttgctgtgtgaagtttctctagttgcagcaagtggggctgctctctagttgcagttaagtgggcttctcactgcagcggcttctcttgggctccagggcagtgggcttcagtagctctgacgcgtgggcttagttacccggcagcacatgggaccttagttcccagagcagaggctgaacccacatcccctgcatcggaaggcaggttcttaaccactgcaccatcagggaaggcccgaggccaaaggctggctgcgcttcccaggtggcactggtggtaaagagtctgcctgccaatgcaggaggcatgagacgcacgttccatccctggctcagaacgaccccctggaggagggcaaggcaactcactccagtattcttgggcttccctggtggcttagacagtgaagaatctgtctgcaatgcaggagacctgggttcaaccttgggtttggaagatcgcctggaggagggcatggcaacccactccagtattcttgcctggagaatccccgtggacagaggagcctggcaagctgcagtccatggggtcgcaaagagtctgacacaatcgaagcaacttagcacgtacgcatacatgagaccagctggctctccctcaggggccaagggtctccctagctcctgacttctaatccatgcatggctcctgtgcatacaggctccaagatttctgtcttctcttcagagaaatgatacgactctcaactttgcattggtgcctaccaaaggctgggtgctcagctaagccttggacatgcagggctacctcactggccccccacagccactccaggaggtaggtgcccaggtccttggttcatatgtgtggaagctgcctgaggccacatagctagaaagaggtaggcctgggattcaaacttgcagggggccaattccaaccctcctggccccaaaccgtgctgcttcctattctaggctccttctctgtctacctcaagttcaagttcacttttcccattgtcaccagccaccaaatgactggagggtctatatctggttgggcccagaggcccttgggttttatcaaatgggtctctcacccactacagcaaacacttcatttccatcaagcagcatccacaagcgaaatgattttctacctccaagcaccgatgtcaagagagccctcccgacctatggcagctcctgggacttgctaggcaagcatccctgagaggggcctcatgttaccttggatgcagcctcggtgagagggcttgcatctcagcaccagggatgcctggctctgagtcctgatctgccacgaggatgaggcacaggctccagtagccacttcttgtgacattcttcacaggagcaatgaaaccactgtgccccttaacgtttaataccggggcttccctgatagctcagttggtaaagaatccgcctgcaatgcaagagaccccagttcgattcctgggttgggaagatccactggagaaagaataagctacccactccagtattcttgggcttctcttgtgactcagctggtaaagaacctacctgcaatgcaggagacctgggtttgattcctgggttgggaagatcccctgcagaagggaaaggctacccactccagtattctggcctggagaattccatggactctttaggccatggggttgcaaaaagttggagagtcccttggactgcaaggagatccaatcagttcatcctaaaggaaatcagtcctgaatattcattggaaggactgatgctgaagctgaaactccaacactttggccacctgatgcaaagagctgacttatttgaaaagactgatgctgggaaagattgaaggtgggagcagaaggggatgacagaggatgagatggttggatggcatcaccaactcaatggacatgagtttgaataaactccaggagttggtaatggacagggagggctgccatgctgcagtccatgggatcacaaagagtcggacatgaccgagtgactgaactgaactgaactgatgtttaataccagtggcccctggtagaagagacattccctgggggccggacccagggctgatttgcttgtggctccgtctccagagtacgtagaggctcatgataaatatttgttgaatgataactttctcccctctgggcctcagtttcctcatatataacatgaatagcaatgggtggagtgacctccaagtcctgctctcctggaatcctatgatgccaggatcaacaagcaacaggatcaggtccactggaagaagagggagggatataaataaataatgaccacgtttaaaattcacttttcattactagattactttctgagaacagaaaaagagcagggctgtagaagagaagcaaagcagaagagatgagcccagaaagggggggcttgggacacagcttaatactaacaattaacatgtgcactgcactttacagttgaccctcctctttctcctccactgtcctgtctgagctctgcagtgccctgtgcaacctggaaagcaagtgcaattacggtcccatcgcacagcagaggaaactggggctcccaagggttcgctggagatgcaggttggatccttgagtcttgccttggaaattccatggacagaggatcctggtgggctacagtccacggggtcacaaagagtcagacacgacagcaactaaacaacaacaacacaaaaaactcattttctttggaatcctaattctgtaaatacagccactaaaatcctcctgcaatgcaggagatgcgggttcaacccttgggtcgggaagatctcctgaagaaggaaatggcaactcactccagtgttcttgcctggagaatcgcatgaactgaggagcctggcgggctacagtccatggggttgcaaagagtcagacaggactgaagcaactaaacagcaacagatgtttagctgctaagtggcagagccagaatctgaatcagggtttctgactgcaaacgcagccctcgggcagcaggccggccacatctccatttcatggaggaacaccgcagttcctgcagaagttcatgaggtcaggggccttggcaggtgctccccccaaccactgtggacattcccctggaacaccctactccccccagcagctgctgagctggcgaaaccaaactgggcacccacccacccatcctatttacagtaaacccctcccgattgcagaaatgggacctgaaactgcctgatgacagcagaaagtgtgagagtggggtcaacagggaaggaggctggcctgccgggcccgcagagagtgccgtcagggagaggcccctctcatctctggggaatgggacttccgctttggacagacagcaggaggctcccggcacccggtcccactctgcccagcccagcagcctcagaggatacaggctcccaggtgaggacggggcttagcaacagggggaccggctggcaggaccagtatgccggagggtggtgcttcctgagcatagggccccacatcctctgtctctgagccgcttggagggttggactctgagggttcctgcaccccatcccagacctcaggaatcaattcctctgggaggtcagctccagagtctgctgccacctggggccccgggcaatggggaggcatcagagtaaacaccgagactggagctgagccccgcttctgcctctcaggagctggcaatctgggccaagtgacgtaacctctctcaccctggatcctttcgggggataacagaacttttcaggggtgctgtgagccctaaaggagatcagctcagcctctgcttagcacactgcctggctcagggtatgtcagaggcagaggtgaaaccagaacccagaatcccctctgcccacccagcctttctctgacacctgccttctcctatttcctcgcggtctggtgagaaatctccgctagcctctttcaagggggaggtgggatgatggcaggtggaattgcaatgagttattagttagcactgacacagctcaactctgcttgtgcaggagggtgtgtggtcggtcaggcactgtgctagagaccgagttccttctaggctccatctcatgtaatcctctggcagccttgtcaggtggaaataaactttgccaaaggctcagggaggttaaggtactttcctgaagtcatgcagcaaggtagcagcagaaggggagttcaaggtcaaactggcctgactccaagtcagggggaaaggggctgttggagctggaggaagatggatgatgccgggaaagatgtggggagtgaggctgatggtggtgatggatgctgaaggcagagggtggtcagatctgctgagggttaagtcttggcccaagtctaagattcagtggcccctgaaacaggccagaacccagatcgccccacttccccaccccacctccagcttcccgaagagacctgagtctcatcatcaaccgctatccctaccccatcactctagcagccaaccagagctccccccactcctgtgctgcctgtacctgacagaccccctccctgagcccagcctcccaaagggaccaaattctttctttagtttcccaagcatcttctgcggtgtcctgaaacttggggattcccagatgatggtgataatttttaaatagctaatattcattaagcatctctaattcaccaggctattgtgagccctaactcatctgtcctcccaccaaccccatcagtcactgcttagcatgctgcctggttcagggtatgtcagaggcagaggtgaaatcaggacccaggaccccctccgcccacccagcaatttctctgacacctgccttctcttatatttccttgcagtctgatgagaaagctcagcagagattaggcagaggtcaggattatccccattttacagaaggagaaactgtttccagagagaagccacttgcctaagacccatagctaagaaggagcagaagcctggtttggaccctcttgggagcagtgttcctctccttgtgaccctccaggcctctcacctttggtgacacccccaacaacagcagcaataataataatgataatatcagccatcacggagcactggccccgcctccagcactgcactgagcacaggccatgctgtagctccttgtatcaggtcgtttggctccaaagcctgtgttttaacccccaggtagagaggcctctgggctttctcagtggctgagcagtaaagaatctgcctacaatgcaagagccacaggaaatgcgggttcgatccctgggtcgggaggatctcctggaggagggcatggcagcccactccagtattcctgcctggagaatcccatggacagaggagcctggcgggctacagtccacggggtcgcaaagagtcagacaggactaagcaactgagcgtgcatgcagagaggcctcttaatgaaacaccccatggggtttaaacccagtggaagtgggtttgaatccccagccgcgtatggctgtgtgaccttgatcaaggttcccagtctctccactgcccagtttcttcatctgtgaaatgaaaaagcaggggtgctttctcagggggctgctgtaaggagcaaattaaatgaaaggacgacctgtaaagcatttggcacagagcctggcacctgctaagtgcccaatgcattgattattaaggttgtcaaactgtcgtctgtaaaacctccggcaagataaatagaatgccagcctctctcgggagcatgacagcccaagctggtcactcgtggccctggtcacatccatctttgcagtccctctttgcctggtacctggcacagcttccagcctcactcaggagtctgaaccatgaactgatcaggaccagaccaagggggctagggctgattttctgagcacacaagcccaaatcagcaggtttttctggtctcaggaaggcctccaggtgccaaattctgtgttggtacaggcactgtaaggcaaaggagaccacagcctgaccacagccctgccattaaccaactcactggacgatttaggaagggttgtttcctaatgtttgcatctcagtgttttcatctgcaagatgggaaaataatcacaacccacttctccagagtgctgtgaggatcagacaacagcagctatgggtctgaactagagcccccaaaccccgtgactctttcccagccatggccttgcctgggtccccatggttatgctgggagatgggctgggaccactctgctcgcctatctaagagcaggagagtgcccaggttttgtgggctgaggggtaatgagggaaggcttcctggaagagaaaggttttgacaggagccttgaaagatggggagaaattggatatgggcaaaggtggaatgagctgcctcagaaggtaatgagcttcccatcactgagatggtacaagcgctgaatgggaagaagcctgggcagagatgttgttgaggagacttaacagtaagctgagggttcctcaagaagttaaacacaggattaccacaagacctagtaagtccactaagtatatacccaagaattagaactaagtattcagacaaatccttgtatgtgaatgctcacggcagtgctactcacaataagcaaaaggtggaaacttcccaaatgcccatcaataataaatggattaacaagatgtaatatgtccatacaatggaatattattcacctgttaagaaggaatgagatactgatccatgctacaatgtagatgaacctcagaaacattatgctaaatgaaatgtcagacacaaaaagctacatagcatatacgattctacttctatgaaatacccagaacaggtaaatccatagagtcagaaagcagaggagtgggttgccagggactgaagcggggagggggatttggagggaactgactagtgaataccaaatgttatttgagggttattgaattgatggaaatactttggaaatagacagaggagagggttatacaatgctgtgaatgtgctaaacaccactgaaatgctcactttaaaagattaaatttgtgttatgaggatatcaactcaatttttaaaaaggaagaagctaagggttggatgagatgagttttaaggtcccttctgtcctgagaagtgatgccatgggcattggccatgctgacaagctcaagatgccccagggtttctgtctcattccccaggattctcaccagggcctagagcctttggagggacctgagaatattctaccagaagaggtggcctgctgtgctggcaaggtcactggcttcagcgccacacaggcctgggttcaagtcctggccgcagtccttcctgtgtgaccctgagcaagtgacttgacctctctgaacctcagtttcctcttcagtatagaaacattggttcttccatgcaggggtgctctgaggatataactgtggaagaagcacaagctgcccaaattcagaagctttaatgactgagaacccttggaccaaaatctcaaactacagcaatcaagaccctgacctccctgccagttctccacactccagacactgtgcggcctctgggcctttgccttctgtcttttcctcctggaacattcttgccccagacctgtctgatcctttgggtctcagcctaaacatcacttctcagagatgcctcccttgtctagaaaactcttctggcaggagaacgcccctcacaaaaccagccctcggggctccctttcatttcatttcagccagagcgctccccgcagcgtatgaccagttccactgacttgcatgttgacctgtgtctagtcccccagaccgtcagctccatgaaggcagggaccatatctgtcttgttcatcacggtatccccaacacccagaacagggtccggtggatgagacactcagggaacaggaacaagtgaaggaatgaatggccaagaccaatcacatcgtcttgtcccccaacagggagcagctgagacagggccgcgatgaagacccctcggggcagcgtgttggtgctgttgctcctgaatctgctccgtgtctcctgggcccagagcaactgcattggaccgtccatccctggcatcccaggcattcccgggaaaccaggccccgatggcaagcctgggactccagggacgaagggagagaaaggtactgtggacactgggaacgcacgagagtcactccccaaggccccatcgcctgcctcccaagtcagcggccctccttagagagcacaaaacacttgcaaagccatcagcttgctgagccattcacagtaagcttgcaaggaagggattctgattcccactttacaggtgggaaaactgatgtccagaaaggctactgacttgcccagaggagcccagtaaatgttgaaagtaaagtgttagtctctcagtcatgtcccgactctgcagtcctatggactgtagcctgctaggctcctctgtccgtggaattttccaggcaagaataccggagtgggtcaccatttccttctccaggggatcttccccacccagggactgaaccctggtctcccgcattgcaggcaggttttttttttttttactgtctgagccactggggaggcccagtcaatgttgcagctgaggccaaaccgtggctgtcttaccactaaatccgcggtggctgcagagtcctgggtgcctccagggtaggcggcttcagccctctgcactgctctttcctcacctgtaagatgaggatggtgctcctttgcagagttgtcaatgggtttaatgaagctgcctgccccttaaaccccccgtgacatgtatgtaattcacacatccatttaaccacagccagctactctcatcacacaatttcagcaaatcctcacgagcccgcaaaatacattgtccccattttccagatgaggaagctgagccttgggcaatgtgagtcagtcaaggggacacgactaagaatggcagaggtgatgtgagaaactcacctgcgtggcccccgagcccgcattcacagtaaccagactctgccactctcctggaagagaaggctttatatcttgtgccaaaccaaggaggggtttggagtggtggagtgagaaaggttcaaatgcccacttccaggttcagcaagacaccactccccaccccgacggccctcggcccccattatcaccaagcacatcccagatgtggaaagctgggctttctggaaggaggctcacaggcctgcccatcctcgtgttcacagacgggaagcaggggcctgtctgaggctacccagtcaggctccctgcctcccagcccagctctttccagtccccattcatctctggccccctcatttatctcatctctgcttttccagggcttccagggcaagttagccacctcaacgagaatggcgagaagggggacccagggtttcctgggatgccaggaaaagtcggccccaagggccccattgggcccaagggtgtccccgggcctcccggagcccgcggccccaagggtgaatcgggagactacagggccacgcagaaaattgccttttcggcctcacgcaccatcaaccaccacctgagacctggccagcccatccgcttcgaccacgtgatcaccaacgccaacgaaaactaccaggctcggagcagcaagttcacgtgcaaggtgcccgggctctacttcttcacctaccatgccagctcccgagggcagctgtgcgtggatttcatgcggggccaggcggagccccagaaagtggtcaccttctgcgactatgtccagaacaccttccaggtcaccacgggcagcatcgtgctcaagctagagaaggatgagaccgttttcctgcaggccaccgaaaagaatgccctggtgggcatcgaaggcgccaacagcatcttctctgggttcctgctcttccctgacacagaggtgtgacctgtggggccgattcaccccccgcccccaccagccaagctctctttctccccaacaccacccccatatcccggccaaagcgcagagtagggctccacgggcgttgctgaatggatgagttaataaagtttcccagcccaagggacagtggtctaattcaactctgtgtccccacaagtagtacatagtaggtgcttggaaatgttgcttgaatgctggttgaatgatggaacaataaatgacctctgaaatgactctgaacgattggataataaatggcctctgaaagcagagtgagtggtagttgctcagtcgtggccgactctttgcgacccaatggaccatacagtccacggagttctccaggccagaatactggagtgggtagcctttcccttctccaggggatcttcccaaccagggatcaaacccaggtctcccgcattgcaggcagattctttaccagctgagccacaacggaaactggagtgggtagccta

SEQ ID NO: 235 - DNA, 1855 bp, Hippotragus leucophaeus
  source 1..1855: mol_type = genomic DNA
acgcataggtaggtacaaactactactatttcaccttttaaattattttattaaatcttcaatgtacaatagcttctttacacatgaactaaatttttttagaagaatgatgttagatcttattacacggtgattctagctcgtagtttttccaaatgttggggaaaaacttgaaaaaggattttcacatctcacccaaaacactgaaatttaacattatcaaagagatgcttctacactcttgaagagtggccactggaaagacatttcaaaaagaaagaattgtatctcaaaagcatttttatatgattttttcctccaaagacagtaatgtttttacataattaagtccattcacaaaatggctttctgcacgtgctgtcatgccttgggccacatcaccaaatatttatgcatgactgaaatgagagtttccttgacattgttatttccatagcctgaagctgttctgttacctctaggctctcattctccctgatttattcaatcaagcccctgtcaaataacaagctcaatatcgccatctctccataacccccactatctccatggcctcctggacaatagtttcctccaccatatgatccttccatattcctaccattcagtttcccactcttcagtaactcgtactttgaaggtttctgcttataatttcccaaattattgcaattctgacgtccgtcattccttcctctgtagttggtataaccagctctgcagcccctagcctggtggccatgtccaggtcctcctccatatccaggactaaccctcaaactaccacctcctggtcctcctccgtacccatggtcaccatccccagatttaccaccgcttccacctccatcagatcctcctttaaagtcccttccttgtccagctccaaacttcccaccaccaccatgcaagtataggaaatcaaccttacctcctccctttcctattctagaatgctggagttcctgcatttcttgtctagacaaggcctttcttacttctgcacgataaccattgatggtatggtatttctgcaatacaagcttatccacgggatcgtggtcatcaaaagtcacaaacccaaagcctcttttccttccagactccctatcactaatgatctcaatggcattgatttttccatatttcccaaagtaatctctaagatgatgcttctccgtgtcttctccaattctacaaacaaacagcttctttacagtgacaagagcccctggttttgcatagtcctctcttgggacagcacgtttgggggcgacccttttcccatcgatggaatgaggtctggccgccatggcagcatccacctcagccatggaggaaaacgtgacaaaaccaaatcttcttgatgtctggctggcaggatctcttatgaccacacagtctgtaagatatccccactgctggtagtagttccatagagtttcttctgtggtttcagagctcaagccaccaacaaagagtttgcggaattcttcattctctctcttattcctctccaacagatcagatgttgacattttcttcatcacgcacttgggcgcttgagccatttttctgaagctgaggaggatgaaggagatctcagagactaacaggaacctgaccagtcccagctcctggcttccactgctctggaaacagagcctccaggagaacctccacgtcctggcttcggggatgctattactgcctctggggcctctgccgcccttgaatcactcttgagccactttcaatttttctgcaaaacattatttaacagagtgacctttccggatgcatattactttctctatgttgatttcttcccatt

SEQ ID NO: 236 - DNA, 2104 bp, Hippotragus leucophaeus
  source 1..2104: mol_type = genomic DNA
aaacttgagtaaaatctttaaaaagttttctcaagtcacctgaaacttgcaaatttaatgttatcaaagaaggaatgcttctacaatcttaaaaataccacaacaacaaagaaacaggaagaagctgagaaactgtctccaaggcatttttttctttgtagaaagccttctaagtttaaatataatttcattatatgatatagaattattttcttttacccctccaggaagaggacaagtaacttgtcttttactaaaagaaaaaatctatttcatcaaagttttcaaatccacttgcataaaattcacaagtgtctttttatacagccttccaatccacctctctggacctgttctgttgtcttctgccacatcactatctatttattcatgactgaaataagagtttccttaatatccttaattcaaaagcctgaaactgatctgggctctcatcctctgctattagacagtgaagcccaggacaaacaggaagaagctcaatatccacttctcccttcataacccccacgtcctccactgcctcctgggccataattttctccaccatatgggactgccttgttcctgccaatgccaaagtttccatttctcattggaccatagtcagaaggttgctggtcataatttccaaaattatcataaccacctccagagaacccaccacagttgccaaacccagagcctccaccaccatattctccacctcctcctccataacaagggtaacctccaaaattcccacctccaggtcctcctccatacccatgacagccatccctagatctggggccatctccatacccatcagcttctcttctaaatttagttcctggccctcgtccaaaatttccacccccactagaagaaacactaaaatcaaaagggtctctgtttctacttctagaaccttggacttgctgcatttcccatattgacaaagccttcccgacttctgcatgatgaccattgatggcatggcatttctgcaacactatcttatccacgggatcatagtcatcaaaagtcacaaatccaaagcctcttttcttgcctgactgcctatcagtaatgatctcaatggcatcgatttttccatatttctcaaagtattctctaagatgatgctcctcggtatcctccttaattccaccaacgaacagcttcttcagggcccagtgggcccctcgctgcccagatgcctctcttgggacagcacgtctgggttcaagcactctgccgtcaatggaatggggtctggccgccatggcagcatccacctcggtcatggatgaaaaggtgacaaaaccacatcctcttgatctttgactggcaaagtccctcaggaccacacagtctgtgagttctccccactgctggtagtacttcctcagactttcttctgtggtttgaaagctcaagccgccaatgaaaagtttacggatttgttcagcctctttcttttgccttctcatagggacagatttccaggttttctccttcacggagtcggttgcttcagcctgatttcccatagctgagggagatgagagagatctcagggatgaatgcagaccagacatgtcctggctctgtggtgagaacctctgctaccccaggaaaatgcctctaggagcacctccacggggacccagcgatgctgctatggcctctaggcacgtttctgccttcctgcaaaacaccatttccatgagtgacctttccagacccagtcatcaaattaacaatgcattttctctattagtttccaattttgaaatgcatgttttatcagctcttcattttgtgttgattttctcactaagttgggtactcaatggtttacaattagtcactgttcacttagtcactttgctcttagaaggagctcgaatatattttttttgaaagaaactattcaaactcccaaaaacactctctgaagttttctcagaaaatcaacttcagttgtacaatcaacttcaggtttacaattagtcactgttcacttagtcactttgctcttagaaggagcttgaatatattttttgaaagaaactattcaaactcccaaaaacactct

SEQ ID NO: 237 - DNA, 48663 bp, Hippotragus leucophaeus
  source 1..48663: mol_type = genomic DNA
agcgactgaactgaaatctcagaaatggaagtcggaaaattgaaatcaagaaaaacagatttgcctaatcacagtctgaacctgtagcgtttactaatttttcccaagactctgaggcctgccgatgagggtgttctgtcggctaaccaagaaaccgccggggaacagggaaagccagctaagggacgcagctctcccccaagccgtctcccagggtaactgggagaaggcgtggcctggacatcggccccgccctcctgccttctccaactcgaataagaattggtctccaggcgcggcggggtggggtggaggcggaaccaggactccccgccccggctggggttaggccgccattttggtttgtgtggctttccgggacgttccgcgtgcctcctcgcttccgggcggttctgcacgtcagaggcccccgaggcccgcgtccgagcgtcaggttggagccgggaagcgcccctgggggtagcggcggcgggggcaggatgagcgcggaggcggcggaccgggaggcggccacctccagccggccctgcaccccgccgcagacctcctggttcgagttcctgctgcaggagtcgctgttggagaaacacctgcgcaagccctgcccgggtaagcccggcgcctgcggcccgaggactgccctcggggctcccgccgcctcgcgccttcctctgccgctaccccaccacccggggaggcgggcctcggggccgagctgtggcgccgccccgtctctgacggggcatcaaaactgcccgtgcggggcgccgctccgggaggcctaagaaaagcgggaaacagaggccctcccgcgcccgccacctttttgtgtttgccgtcttgtcgcctctgtgaccttgtgaccgtaactcgggttggggcctcagccctcccctggggctgaaccccggacagtttgggcgggggatgcggtctgcggagacatcagctgttcagaggctggtcctgacgctgaataactatcttaggtccctattttaactgttttattcctcaacgaacggattctgctgactcaattattccaaagttccgctgtaaatcaaagcgaaaacttctgaaagaaaatgctgttacagttgcaagatggttattgtataatgatgttcatgattgataccgcagttcaggagttctgtttagggagggtgggaaataacaggtatttctggaaagaggtgatggctgaaaaggtaagtaccttggatgataaattgctgataagagttcgaatccagatgtggcttgttcagtctaatccactggcctgaactggtggagactcctgtgcgagaagttggtgtacttcacgtgtgcggttttaccccactatattgtattcagttcagttcagtcgctcagtcatgtccaactctttgcgaccccatgaatcgcagcacgccaggcctctctgtccatcaccatctcccggagttcactcagacttacgtccatcgagtccgtgatgccatccagccatctcatcctgggtcgtccccttctcctcctgcccccaatccctcccagcatcagagtcttttccagtgagtcaactcttcgcatgaggtggccagagtactggagtttcagctttagcatcattccttccaaagaaatcccagggttgatctccttcagaatggactggttggatctccttgcagtccaagggaccctcaagagtcttctccaacaccacagttcaaaagcatcaattcttcggcgctcagccttcttcacagtccaactctcacatccatacatgaccactggaaaaaccatagccttgacaagacgaaccttagcaaagtaatgtccctgcttttgaatatactgtctaggttggtcataacttttcttccaaggagtaagcatcttttaatttcgtggctgcagtcaccatctgcagtgattttggagcccaaaaaaaggaagtctgacactgtttttactgtttccccatctatttcccatgaagtgatgggaccagataccatgatcttcattttctgaatgttgaggtttaagccaactttttcactctcctctttcactttcatcaagaggctttttagctcctcttcactttctgccataagggtggtgtcatctgcatatctaaggttattgatatttctcccggcaatcttgattccagcttgtgtttcttccagtccagcatttctcatgatgtactctgcatagaagttaaataaacagggtgacattatatagccttgatgtactccttttcctatttggaaaaagtctgtcattccatgtccagttctaactgttgcttcctgacctgcatacagatttctcaagaggcaggtcaggtggtctggtattcccatctctttaagaattttccacagtttcttgtgatccacacagtcaaaggctttggcatagtcaataaagcagaaatagatgtttttctggaactctcttgctttttccatgatccagcggatgttggcaatttgttctctggttcctctgccttttctaaaaccagcttgaacatcagggagttcatggttctcgtattgctgaagtctggcttggagaattttgagcattactttactggtgtgtgagatgagtgcagttgtgcggtagtttgagcattctttggcattgtctttctttggaattggaatgaaaactgaccttttccagtcctgtggccactgctgagttttccaaatttgctggcatattgagtgcagcactttcacagcatcatcttttaggatttgaaacagctcaactggaattccatcacctccactagctttgttcatagtgatgctttctaaggcccacttgacttcacattccaagatgtctggctctagattagtgatcacatcatcatgattatgtgggtcgtgaagatcttttttgtacagttcttccgtgtattcttgccacctcttcttaatatcttctgcttctgttatattgtgtttatgtgcttttaattcagtgcttttgatgaacgtctgttgagtgtttctaggtgccaggctctgtgcttcgtgcttcatagctgcattctcatttaattctgtcttcatgataatcctgtgagataggtgatcctctattttgcattgacaggaacaggtgcagagaggtaacctgatgcaagtcccactaattaagggttaaagcaataattttaaacatggtatttctttcccctaattgacagttgttgtttgctgaactgaaatctgtaaccactatgttctgtcgtctaaagtgctttcgtctgcaaaaatctgttctctttccttcttacatccttcctgatctttcgttttaatagccaggcacactgcttgtgaattataatccttagtcactgtaactacacaactgtttgggtccccttttttaccccttaactttcaaaagtgaagaatagttgatttgtaatgttttaggtgtacagtgaagtgattcagttatatgcagacacctgttccttttgagattgttttccattgtttatgtgcttatttgttcagtcatgtccgattcttgcgaccccatgaactatagcctaccaggctcctctgtccgtgggattctccaggtaagaatactggagtgggttgttacaggttcttaaaataacctattggagtatagttcaatatcgagtatagttccctgtgctatgtagttttgatatattaatattgaatatagttccctgtgctatatagtaggtccttgttgtctgccttatgtatattcgtgtgtatctattagtcccaagttcctgatttatcgctgccccccagcccctttggtaaccataaatttgttttctttctgactctatttctattttgtaagtaagttgatttgtatttttttttgattccacataaaactgttgtcatatgacatttgtgtttcactgacttactttacttagtatgatgatctctagatccatccacgttgctgcaaatggtataataatctcattcgtttttatggccaagtattatttcactgtgtatatgtactgcacattctttatccattcatctgtcagtggacattaggtttcttcagtgtattggctattgtaagtagtgctactgtgaacactggtgtgatgtattttttgaattagagttttcatcttttctggacatatgcccaggagtgagattgctggataatattaattgaagttattttctattataggttattatttccattccaataattactaaaaattttttcatatttgtagacttttagaccgtggccattctcaccattgtgagttgattgattactctgtgtagtttgatttgcatttttcaaatagtgatacagagtatcgtttcatgtgcctgttggcctatttggattccttttgtggcgagaaaccaatagggtgaatccttttgcatctttgtaattagaccttaaattcaagaattgcttccttttaaatcctagatcctgcaccagttcagcttatagtccagtttttggaacaggcttccaaaccttcagttaatgagcaaaaccaagttcaacctccacctgataacaagagaaatcgtgttttaaagctacttgctcttaaagttgctgcacatttgaaatgggacttagacatattagagaaaaggtatacaagatttaaatgaattttaaaaaaagatttaaatgaatttattttgagaactgttagatattttggtttatttcagtatgtgttcttgtaatatgggtctttaaagtgaaaactatttttctatgaattcttggtaaaatatggaagtatttttcaaaaagtataagaaaatatttgactgttgaatgaatttaaatcaccttttaaagtataaacttggtgttatcaataatgagcccatttgttattattcttatttttttgacgtgataagtagagaaaatccacgcctaaacagttttaaatcttcattttacttttacatatctgaagaaaataaaaattagtgatgaatcatatgtaatattatggtacatattatctttgttgaataattcatttaattttaccagtcataaatcagtcactgtctcttaaacttttaaactatcttattagaatcagtggttatttgtttataaataaatatttcaagtgcatcgttatataatgatttgttttcacccccttttcacaatttatagagaaataccttatagaatatttggagaaatagaaaataagaaataatagggggggggaagaagtgtttttaacatttttgtgtaatttttgttgttttcctccatatatttttaaacaaatttgtgaacataccttgtatactgttttgagttttggttatttcatatagcaggatatcatgagcatttccccagtttgttttttggagattatccattgtatagataatttattaattgttcctctattgacagttttttagtttttctctagtttttcacttttataaatcatagagctttaaaatgtctttgtccataaactttatatgaattttgagttgcgtctttagtatagattgttaaattgccaggtcaagtggtgtaaacattgttaaagctcattatgcatatactggattgatttccagagagttatattcgtttatactcacactagtagtatctgaacacttttttcaccatatgttttccagcattaaatattagtattaaaaaaaaggtttgttctttaaggaggagcttatcaaggcttatcaccagatagcaatgtgtgcagaacagtatgatttatatgatagagttggaaaattgagcacttgactggatatttaatgataaacagtaatttctttaggtgtgaaatttatactgtcattatgttaggaggtaattttttggagataggttctgaaattcttgggaagaaatgatttactattgggaatttgctttacagtaatatggaaaggagggaaatgggtgagagtagagatgaaacaagattggccatcagttgctagctgttgaagctggatgatgggcacatgggtgtgtattatattattctgtctacttttgtatatatttaaattgttttcataagaaaagcttaaaagttcttttggtaaattttcatttacgttgttgagacaggttaatagaatggccctgtggatttattactaaaacaatataattatttttagcaaagtactgaattgtgcattgtgtccttgcacaacttatgtgtcttttgattcttccttttttaagtttgtctgttccagtattgaatatgttgttgaatgaactgctgtgcatcagtaaagttcctcccgggacaaagcacatagatatggatctggccactttaccgccaaccactgccatggccatacttctctacaatagatggtaaatgtttcataaacctagaatgtgttgggcagcctttgtttaattgcattataacttcagggatgtgcttctaagtcattccagggatctctcagaggaccttgggaatagtgaatctgatggtggagaaaattatgactgcatagacgaaaagcattctgatagagaagtggatggcttacagagtttaattatatgtcagaattttggatagtttataagtcttctaggaagtactacaaaaatacttgaagtgacatttataatgtattaaattttgtttttgtcttttttttttttaaagggcaattaggacaattgttcaaagtagttttcctgttaagcaagcaaaacctggacctcctcagttaagtgtgtaagttggccaataaagacccttacttggcacttttttgtctttttttttttttgcaagtttttaagaactcttggtacagaaggaaaaaagcagaaatcagggcagaaggcctgcatgcaggtaggtttggaggggttagaagagtgagagaatcagacagggctttggataactagagtagagagctctgaaaaaggaggggagcactttgtaaactgtgcctttcatcttaatgttagctgacctgctttcaggaattaaaattgttttcatttaattaaatttacatgaaaaagatatgtttgttctgtatgtgggaaattttaatttagagtgcaaaagttaagtacaatagtttgatcaggtctggagttttaaacctagttcttagattccaagtagtagtaatttacccaaatttggagctagagtgtacatcaagtttctaacttgatgtaaataagcttttgctgccagaaagtttcatttttaaactgagggtttttttttttaatacaaagtaaatgaaaaaataatggtaaataaaggagcatcatcatagttgagtttattgttgaagcatgaaaagaaatagcattaaaagcatttttatttatttaaattcagtctcactgtcaagaataatctttaagttttgaattttcagtctttcaagtaatatttggtactcttctatcatttctcttttagtatgaatcagatgcaacaggagaaagaactaacagaaaatattttgaaagtggtgagtattggtatcggttacaccgtaacctttctgggaggtattatatttagagcatgtgtatatgcttcttctaatcttatatatattaagagttggcttgctttagatgcgctaacatttagactttgttagaacataatttgataatattctaaattgacattttttaatgttgatgagagtacttggcccctagttgtcagatatttcatagtgctttagcagatgtgagaagtcactcttataggtgttttctttatattcttttatatcctctcaaaattctgtagtaaacatgtatttaaaaattaattttattttaaaaatgatttttacaaattttagtttatttttactcttgttttggccatgctgtgtggcgtttgggatctcagtttcccaatcagattgaatccaggccgctgcagtgaaagtgccaagtgctaactattggactgccagaaattccctaaaactacttttatattcagaaaaatacagttacttttaaaattgctttggtcaacataaaagtagaaaccataatttaaaaatgatctctttaattctttatttaatatacagtatatcagagataccacccaaagtgcagaggctaggaaaggagaaggaaggtaaacatctgtatctatatacaacagataatgtattttgaatgtggaagcaaaaaatgtgtcattttattattattatctaatgcctagtaaaaatgactggcacgtcaaagcatacaaaacatttcttgaatacatcaatggaacggtgcaaatcttaaacatttttcattggtaacttttatataaaagaaagatgtcaatcttttccaatttgtattttaaatttcacaataggaaccttgtgaattttaaaatcttaagataattttcacaaatataatttcactcgtgctatgttagatgcatttttaaaatagactagtacattaagctgctaagtatcctgtaaatatgttttggttgatatagtccagtattgccatttttgtattttaaaaatttgcttattgaacttctgtagctaaaagaacaagcttctgattctatcctggtactagaggcagccctaaagttaaacaaggatctttatgtccacacgatgagaacactggacttactggccgtggagccaggcatggtaaacggagaaactgagagttccactgctggactgaaaatcaaaaccgaggagatgcagtgccaggtatttattttcagtgtttaatcattgcatggcaaatttttggaaaatcttacataaaatcatccttgtatttttaattagagcttatttctgtccttgtccctttgattttacttctgatgtttattaaaactttgcattatagttaattgtgaattttataagacctcccttgaaatttttctgaaagaaatggaaggaaaatttcacatgatcttttgtttccaatctagtttcctcgttatatttaagagactgacagtgcagggagtaataatatgaatgaactgactaacagttcattcacattataagaaatctaatcagaccaagaaaacaaaacaaaactgatattgtgctagattttgaaaaatgtaggctcctagagaaatacccagtttttcaaggatcttaaggctgcctgctctccgtaactctgtaccctagttcctttgctgctttcagttgttttttgttgttagatattttatgtgttgatagcttctttttccctgcttgattgtaaactctttgaggtctctctttttaaaaaatatatttgtattttgcatcttccatactttctagcacagaatcttgagtagaatagaaattttaaaagaattaatgattgcctgtggagggccactacaatagagcctttcatgttctatattttcttcattgtgtgaactggcataacatttttaaaagttaatatttttggctgcgctggttcattgtagctgcttgcgggccttctctagttatgccgagtggaggccactctctacttagggcggcttctcttcttgtggagcacgggcacttgggcttgagtagttgcagcttttagcctctagagctcaggctcagtagttgtggtgaatgggcttagttgccccaaggcatgtggaatcttcctgaaccagggatccgacccacatcccctgcattggcagacaggttcttaaccactgggccaccagggatgtctggcatgacttcttttatcactattgcccaatcttgaaagagcagaaatacctctgatttaagggttgagaggtaccttttcagattagctggttctggagttaaagataatcccttctcaagacttgctgagatggagtctcatcgagtaggagtcaggaggcattggcagctggtaaccacttcaagggctccccaatggctcagcagtaaagaatctgtctgccagtgcagaagacgcaggttcggtctctgggtcaggaagatctgctggagaaggaaatggcaaccccctccagtgttcttgcctggagaatcccatggacagaggagcttggtgggctgcagcccatggggttgcgaaagagttggacatgactgagcaactgtacagcaacaacaactctgtcttggcctggaaaggggaatatgtatctataatatgtgtgcatatataggtgtgcttgtgtgtatataaatctttacaatatacatacacacactttattttaaaactttagcactcctttatcctagatggaaggaagcactttagaatgaaaatctgcccaacattaagtatggactaaatagtgtaaagcagtattctagaggctgaggaagaattaatcttgatttgttgaacaggacagaatagtatctatagtccgtatcagtgaagagtagtttggtcaggagtatcagagacttacaccttaggaatttgaaagaggaatgagtatctgttggctcaggttggtttggtgcaaatggaaataaacagtgtggaatgaaatttatttctacatctgatgtgaatggagagttgagaagactggtgtgtttgaaatagagaagaatagagaggtttggagagaaggtagtccagattctgagatccttgaaaatcagcccgtggggtttgaactttctcctccttggggatataagttgaaggctttttttaaaagtcagatggagaagacagagcagtcagccttgtgaggagtaaatttgtgatagaatattaggaacctaagggtctggcttcaagtctggactctgccagtgcttggttatatgctttcaagtagaaatgtcactttctgggccttagtattcttgttcataaaatcgccaagttcaacttagtctttgaattctgcattaggtaaatctaggtatctgtttaagaatgctcctggaaaaaaatgtgcagattctgttaggcaactggaaatgagctgtcattttatactcatttgttcagatttttcagtattttattctggccagttctttgatagtacacatttgctcctcctacccttttggagacatccccatggctgtcccctttttcattgttagaagaatctcctaccttctgtgacttgttgggagggagaccctgtttcctgtaataaaactgacaactccaaatattcgtgttctctagccttatcctgctggagggcaggcatgtcatatcggtgtgacagagacgtttagactgaattaagagctagctgggctcgcctggtggctcagcagtaaagactctgcctgcaaatgcagaagccacaggagatgtgaatttgatccctgggttgggaagatcccctggagaagggcatggctacccactccagtactcttgcctggagaatcccagggacagaggagcctggcaggcttcagtccatggggtcgcaaagagtcagaaactactgaagcgacttaggacacacgcaggagcttgctagtgagaaagtggtattgtggagcatccattgtgacggtgactctagcagtgaccggaaggtctagttcccgggcagccctggcggagtggagctgctgctttcagcgtctggtcctgctgcctgcagttgcccggatctgtggcgttggctgttgagatggctgcgtggtgtttcactgcatcagttgcggctcttgttctggctgcttgcctcccatctcccgtttgttttccaggcctgattctttggctttcccaataattctgtaggccacctgaggtctttccagtaagtccccttaagtcagtcagagttgatttctgttgcttgtgactaagaacattgactgttttactgctcattgaaatgtttttttttcttttttgctacatgtgtaactatgttgctgagataaaaggtgattttgttttgtcagctcttaagttcctgaaaaatcactgagcaaattggtattcattaccattttaggtgtgttatgatttgggtgcagcatacttccagcaaggctctacaaatccagctgtctatgaaaatgccagagaaaaattttttagaaccaaagaactaattgcagaggtaagtacagtcaaaacagtcacatgattttcagtcctttaaaacatctatatattttttggtatccatttttttgatgattaaaaaactgttcattgtagtaaatttgatatttaaaaaaactaatggaaatattttaaaaaatctgtaatactactctctggaaataatcccttttgccgttttagcttttttttttttttaacagtttttgttctttatgtttttatacagttaagctcatgctattttgtatcttgctaaaatgttagaatatatattttaaatatatctgtcctattctgttatatatagatgtgctgtgtttttattttcctaatggttgaacatttagatagtttgctgttcttatttattataaagttacaaaatttatatctccaagcataaatttttgtttggactttagatagagttaaattcctgcaagtagaattacagtgtcagtggtcattaatttttttaaatgatgtaatatacaaattgatttctaggtacatttctgggtacaaattgatttccgaaggctctgctattagcagtgaagttttttaattgctgatttgatatttatccggaaaaccttttaaaaagttgtgtttctttaattcctagtagggcaaacattttcatgtgtttattgtttgcatctttttatgattcacacaactgaattttaaagtatataactaggtttttatatgcctggtggccagaaaaattcccacttcaatctttgctttcttcaccagaaacactgaataaatgcactagagatgtcttttattgggaattctccttttaatttgcctcgggaagtcatcagatttctaattttatggcatctgggatatagtaatttaaaactttaattttttaaaaaagcatgtcttaaaaaattttttttcttttttggtggaagcatttctattttttctggttgagtgaagattgagttttctttgttgtccccctttaaatctctgccaagtatatgtatcaatattttaaagtattttcatcttttttttttttaacagttttcattctttgttagtatcttaattgttgttatacctacagagagtgataataatgtctaccttcttatgttggcctgaaaactctaaaccagaagtcaccaaagtttttttgtaaagggctaaataataaatactttagactttgtgggccatgtacagtttctgtggcattatctaatttgttggggttttattttccctccctttacaacactaaggattattcttaggtcatggaatctgtaaaaacaggacatgggctggttttgacctgtgagcaatagtttgctacccctgctctaaacctttaactttttcattttttatgattcctgttttccattggcgttttcttatactgttaaaatgcaataaatgggtgctagactattgtttctgttacactgatggataatgatatatacctcttactttacagataggttcattatctcttcattgtaccatagatgagaagcggttagctggctattgtcaagcatgtgatgtcctcgtgccgtcctctgatagtacatctcagcaattgactccatatagtcaggtccatatttgtttgagatctggcagctatcaggtaagatgtgtgatggggatacagtagtgtcattggaaagccctgtaagccagacagcagagttcaaatcatgacatcaccatttacagttgtgccatttggggcacgtcaaacagattggcctataaaatagttgtaataattaagctttttatgagaatcaaatgaaaagttatagtttataaactcttaaggcagagcactggatagatgttgactcatattactgataattatcctgtcttgaaggtataaaatttgcccattttaagtacattctgtaagaaactctgtaggcagaacttttaacttttaaaattacaggtagagaacttttggttttatggaggctaaagatctgaaagtacggtcttccaccctgaccttattagccactgcgaacagtgagactgaaggagagggtgagcagagcagttttggtcagcttggatagtctgttacatagcccacttttccagggaggctggtcgtcatctcacttttactcatgaaaagagcttaaattagtctgttgagatttttttgttgccccctctgagtatatatctgcagctttgtaatgaaaatcactgggagttggaatttgtacttttaaaaaaagccttaattctagaaagtgaacagtgccttcatcttattaaattcaaaacaaattatgaaatgacaatgctatcacatacctttagttttgtgtctccacaatggacttttagcctaggtttttagttcacttttctcaacttttggggttttattttttcttcagagaaaatagaagagaggggacagtgctccttcccctgccctctggcccctttttttgccaattctgatttgccctagggaagaaaagtaaactttcttgaaggtggatttcagatacagatgaagttatcaaacacaagggatctttcagttacctgtccctaatacaggcttatggggagtggtaatcagttaggataagatgtagaatctttaagacagtccctggcatagtaagacccttgcagtcaagaatggcagtcacagatcggcacatgttaccacgtgtgacatgctcagtcgctcagttgtgtctgactctctgcgaccccatggactggagcccgccaggctcttctgtccatggggattctccaggcaaggatactggagtagtttgccatgcccttatccaggggatcttcccaacccagggattgaacccaggtctcctgcattgcaggtggattctttaccagctgagccatcagggaagcccgcatgttaccatagatgtaataaaggggtcagtgctcttgctgtagagctgatttagctgtttccagaaatccccacactgtcacccctactttcttccattgcttgataaagagctgataaacaactgagaaaaaagactattaaaaatactatgataatataatttattagaatgataaattttgtacagttcactaatatattttaaaccatttaacctgattagactagtttcttagcacactttttttagctgaaatatttctctgttttagcgttttaaaaagtttgttgtatgaaatcatgtttaaagtgaaggagaggaattttaaaagtctctaataacatagctgaattactacttaatgattcttttctcacctctcacttttggctcatgatctccaattttaaacaagggtagtggggtgcttttgccatttcatactgttcatgcggttctcaaggcaaaaatactaaagtggtttgccattcccttccccagtggaccatgttttgtcacaactctccaccgtgacccgtctgtcttggatggccctacacggcatggtccatagttttattgagttagacaaggctgtggtccatgtgatcagtttggttagttttctgtgattgtggttttcattctgtctgccctttgatgaataaggataagaggcttatggaagcttcctgatgggagagactgactaggcggggaaactgggtcttgttctgatgggcggggtcatgctcagtaaatctttaatacaattttctgttgatgggtggggctgtgttccctccctcttgtttggcctgaggccagactgttgacccatgcctccaccagagactcctggacactcacaggcaagtctagctcagtctcctgtggggacaccgctcctcacttagtcatgtatgcatgtgagagttggaccataaagaaagctgagtgccaaagaattgatgcttttgaactatggtgttggagaagattcttgagagtcccttggactgcaaggagattaaacctgtcaatcctaaaggaaatcaacccttaatattccttggaaggactgatactgaagctgaaactccaatcctttgcccacctgatgcgaagaactgactcattggactgttaaaagacctcatgctgggaaagattgagggcgggaggagaaagggtcaacagattggttggatggtcaacacaggttggatggcatcaccgattcaatggacatgaatttgagcaagctctgggagttggtgatggacagggaggcctggcatgctgcagtccatggggtcgcaaagagtagggcatgacttgagctattgaattgaactgaggggggtgctatttttacccttaatgtaattttaaaattttaggaagagattttcctaaccagatattttaatgattttcttcactatgtaatttctatttcagaaagacttaaaattttatttaaaaaaaattttttttaagagactttcaagatttttgaaatagttgcaattttttgtctgtgttccaggaggtaataaagatctttgttgaagacaacttaagcttcagtttacctatccagttccggcagtcggtcctaagggaactctttcagaaagctcaacaggggtaaggaagtgaattactttttgatttttatgtaatagtaagtgtgcatttccgatttatcaataatgttcctccagattacctgtatgtctgccacagtgctttcactttatttttactgtatggagagttaacatggttagaggagccgctttaattttcatctaattctttttttaaaagtgcttgggtaaaaaaatttacacagcagagtttgattctgttagtttgattcagattaatctgtatacctaaatatacacttttattctcttccaaaacttcagtcacttgctcacttggtaaatttaaaactttcctgtttatttttttcccccattgacttaggtaattactaatgtgcctgaatattgtaaaaatcttacctctcaagaataaatggcccattcttgtgattttagttttataattatacctttgtattaaaaaataaatgagtgtatctacttttgtatttgacagaaatgaagccctggatgaaatctgttttaaagtctgtgcctgtaacacagtccgtgatgtattagaaggtagaacaattagtgttcaatttaaccagctatttcttagacctaataaagagaaaatagactttctgcttgaggtgagacatttttccccctttggtttataattttgctttgagttttccagtggcctcctagctgccgcacctggaaccctcttcactgtcctcgtccgagggtctcgcctctccggctcaggcggcgcggccgacagtgcgcttgcccaccgtgtctgctgctggagctcgcttctgcttctccgccatcactgggttttccttagtcctccattgacttctcctttgatctccctttaatgttttcctttactgaagttttgtccttggctcactcagcttgttttactcttcaccacttttattttcttccaaaacttcagtcacttgctcactaaaaacgctcagatcatacctcttgcctctcatgtgagctccataatttgtgtttctaccagacctctctctctctctaatagtcttaatgtagcagaccttgagagaagtgcatcaaatacagataataccattttgttccaaaaatacgatactgccagtgctctcgaagtccttaatgtgtcttcccacatcctctctgctcctccttgaggaagctactaccctgcttttttgtgatagttatttcctcatttctcattacagttgtatcccctttgtatgtacccttaaagaatattcttaaatttgcctgttttgatctccacataaatgaaatcatatttgtcttttttaagttgtctttcagggaacatatttgtgagatgtttttcaagttgtatgcagatatagttttttttttcctcattgctgtaagatgttacaacattatgtaaccatgccacaatttatttattcttatgattatggacatttgtgttatttacaggttggggttattctgctgcttgaacattcttgtgcttacatcctggtgcacccacataccatttatctgttacattcctggagaaagtatatctgcaattttaccgtaaagtttcaaagcgtttctgccactgcatgtatgagagtttttgttgatcaggatctcactgtcagatttcctgtctgggtcattgtataatggtatctcgttgaggtgattttacttacttatttgttggctgcatcagatctttgttgctgagtgggctttctctgcttgcggcccgtggggtctactcttgattgtagtgtgttcattgcagttcaactgcagtgcagttctagccctgcattgcagggcttctcacagtggcttctctctttgaggagtgcaggctctaggtgcacaggctcagtagttgtggggcggagacttagttgctctgcagcatgtggaatcttcctgaaccagggattgaactccagccccctgcattggcaggcaggttcttaaccactggatcactggatcaccaggaaagcccccattgaggttttaatgtccttttcctttccctttattttttgtttctttattttccttccttttcctttattactggtgaatttaacagcttttcatttattttttttcatatacagatttcattttttgaggtgcttgttcaagtggtatggctcagttttctgttgagttgtcttttttattttttggcaggagtttttaatatattctgtcctttactagttttaagtattgcaagtatgttttctgaggttcacttttaacttttattattttaaaagttcttaattttaatataataaaatttatcagtctttctcataaaggaagagattaatgaatttctgtgtcttgcttaaagcttttcatatcctgtagttgtgaaaattatcctgtattttattttctaaaagctctagaacttggccttcttttcacatttaggtctttaatccacctgtgattgaatcttgtgtatcatggaaagatttgggtctttaatccacctgtgattgaattttgtatatcatggggagatttgggtctttaatccacctgtgattgaattttgtgtatcatggggagatttgggtctttaatccacctgtgattgaatcttgtgttcatggggagatttgggtctttaatccacctgtgattgaatcttgtgttcatggaagtagggaatccggtgtcattttttcctcacgtgtttcagagccagttgctgaaaatgtcctctttttctgccggtgtctagcgctgcctccattggattccaagtgtcagacatgcacacctgtgtgggcctgtctctaggctactctgtgactgcttttctgtttgtttacccatccatcatacccgtacccaggcttggtatcatctaaagcacaaaccttgttttccaaagttgtattggttttgcttatctttttacattttcttgtagacagtagactcagatggtgaagtttcagaagtaagcctgttggatttttgtttgaaattacattacacttaaaagccaacttgtgaaaaattagtagcattaccatattgagtatcctaatccaggagctggtatggctcttgatttattttggtgccctttaatgtcctttaaagctttataatttttccagagaagttttttttttttcatgaactataattgaatttgtataattgactttgtttccagctagtaatatacaattcactcattcaaagcgtacagttcagtgattttttagtatgttcgtagagttgtgcagccatcacctcagccagtttgccaacatttcattcctctctgcccctgtaagaaaactctcaaccattagcaatcatttctcattttcctctcaatccctgcaaccctaggcaactattgatctattttttgtctctgtagatttgcctattctggacatgtcatataagtgaagtcataaaacatacggtcttttgtaactcacttctttcacttggtattgaagacatttcatccatgttggaatgtccctcagtacttcattcctttttataggtgaatagtgtcctactgaatggatacacttacttactcttcagtgtctgttttgagtgtccattcatcacttgatggacgttagtgttgtttctattttttggctcttgttaatagtactgctgtacatgttatataatttagcttttgtgtcagcatattagagagcattgacaatttgttgaggttaggatcttttatactaataactttttgacttcttgtaaataatatgtgggaagtctaacctaataaattcacaatgatatttaaataatattatttttagatgactaatattttcatagctaagttgctctttgttttcattgtttattttttaaaccttggttacctccctaaccattggtcctgtgttctttagctattgtggatcatccttctcagctgtccaagatgggtcttttctcacttttctgaggggaactcctgattcttacagtttatcactccatttaatttggggccatactttgtaaatttccatgggacttgttcatatgctaaatagattattctttactgcataatccgtgagattatcctttacctacagttcttgaaatggtcacattccacgccctctgcccataatgcattcttattctttggtctcctttcttaaatttcttaaccaaatctgtgactgatccatgtctgaaaggacaatttgattgtttttaaatctaaacttgcaaactgtagtataattattttgaggtacccacattcaaataaaaattacccaaattcctaggtttgttcaagatcaataaatttagaaaaagcttcggatactttgaaaggaaacatggctgcttttttgaagtaagtgcctttctttttcttcttttttttaattttgagcttaggtctgtgagaaaaatatcttttattccttatcattttacatttaccttgcctgtcttcatatatccaggtagtaattggtagttgagaacacttacaatttaaatttgtgtagccgcataaaacttaggattcttgctgttactctctttaatactgtagcagtgaaatcataactttagataaggaccaaagagaaattttaaaaactgttcaaattattgttgtgcagttactgaatggtggcttttaaatagtttattaataaaaatcggttatatgattttttttccccaaactaaaattatattcttctttgttttataacatttcttactgatctaggaatgtgtgtctggggttggaagacctgcagtatgttttcatgatttcttcacacgagcttttcatcacattactgaaagatgaagaacgaaagttacttgttgatcagatgaggaagaggtcccctagagtcaatctgtgcattaaacccgtaacttcattttatgatatcccaggttagatttcctaactcgaattttggcatattttgctcctcaggatatttgaggctatcttcttaattttttttctatttacactaatgctggtaactaatagaaaacctgtcttttgaggtcatattctgtctaagcagttaagttttgggagtctgctgagtatggttaatggagatgtaggtctggatacgtaaaagattttagctggggaaatagatctgctgctctgttcttgaaagtataaaccaagacggaagaggagtggttagaagcaaaaaatggtgcaggtttgcatgcattacagtctttatatcactgtctgctggctaaacattcagctttgacaacataccattttagccttatttgatgattttcttccattgttttctcttattttataaatgtaataagaaaatatagtgctgcttgttaataagaaatacaagcttcaacacttcaatatgcaggggagacagaattcagttgactgaacttgttgctactttggacctcactagatttaagctgctttgactcggtcataaaggaaaagagtgatattatcacagataaaatgctggcaatgcattattgaagactgtatctgaaagttgagttgtaattaggaattttaatgatctattcttggttctctgggaaggcagtgcctctaccttctcattctctcccttcgaaaaacattcttaaagtttactactcagaacattttagaagtgcttttaacacaggatgttcaaaaataaatcaaatttttccatatatcccacataattctttccatgtaaagttactgatttttattggtttatattttcattacctttatttgataaatgaagacataatccaagttgtgttaggctttttatatgagagtgaagttaaaacatagtttgcattaagttggataaatcagttttcaagatgaaagtttataaacttctaatgtttataaacatgcacaatttctgtcagtaaattaccattctcatgttttcacgattatgagtaacgaatgaataatgtatcaaataattatttaagtgaaaatctcttcttcctttcttagcctcagcaagtgtcaccattggccagttggaacatcaactgatactgtcagtggatccatggagaattcgacagattttaattgaattacatggtatgacttcagagcgtgaattctggacagtgtctaataaggtaagaaacctctgttgagaacagataaaaaaatgacccttgttttctgatgtaatctaatagaagagctagctgttccttgaactttttgagaataagaagcccttttgtttgttaataattcatcagtaatgtgaaagaccttcacacgacattgtattttgaacatctactgatagagaaaatatgaaataggtaaaaaagatattaaatcagtaacaacaaaaaatgagtttctgtttcatttgttgttacagcatctacatgcattttcagtatagctgtaaatatgtgtatatttgtgcagtctgcagctaatacttgccatacagagtagttttggtttagttttttcatgtcctaagtctgaaggctgcaggttagaatcacctcattaaaacttgtttatagaacatttttagctttagatatgtttttaaaaatgcccccctcactccccaaaaaatgccaagataatgtttctgaagttgtctaagttctgctgcatggaaagtgcaaatgaaatagctttttaaacattcagtggagtatagctagagattattatactttaccttcacctgcatctgtgagctaagggaactagctcacagatgcaggtgaaggtaaagtgtaatgatatggggagtttgcctttagcgtgagcatcttattcgttaggtgtagtcctagtgtgtccatgctgttgtgtcccagctctttgcagccccatggactgcagcccaccaggctcctctgtccatgggatttccccgggcaagaatactagagtgggttgccatttccttctccaggggatcttcctgacccagggattgaacccattgcaggaggattctttacttgctgagccactagggaagcccctataataatatgaatgtgtttctaatatagctagctgcgtactccctctctgctgaatgtgataaaaagcagctagaaattgatgtgtattctgtgggatttgaatgtacaagtgaagtgaaatgaaaaattgatctcagtcttagttgggcttccatagcattgaaatcattatttgtgttcatttatatggatgaggaagtgtacagcataagagttatgagccaaagttctggtactaagtacctgagtgtgaatcccagtgctctacttaattagctgtatagtcttcagcaagttatttaacttctgtgtacctccgttttctgatctgtgaaatggagatatagtacctatttagtaataacttgtgaggatcatatggattaacacatactaaactcctagatttcgtctttatctctataggctatccttcagaaagttccaatccatttaattatttattactaggttattatagtgaatatgttcatcttaattagcggttcgttgcagctatcattttcttttctctttaaaaaatgacgtttgaatgattttattaaatggagttgactgttactgaagaattgttatctagatttggctttgtgtgtgtgtgtttatgtatttttatttcttctagtgggagttacctcttgtctatagtagtgtcatcctgggaattaaagacaatttaacaagagatttggtttacattctaatggccaaaggtctacactgcagtactgttaaggtgagtaaaattatacactgacctctggttaagaatatgctttattagtttagggtaaaaccaggaatcaggatcagttttgtgtttctggtcttaaaatcatcattgtaggtctgaaaggatatctgaaaaggcattttggtttattcttttccctttgtcctcataactatacaaaaatggtcttggacatatagctttgtctctatttcttttaaaaaattagacaacatgaatagttcttatttgtatttagtattgtgttagtaaaagattgtatttcaagctaaaaacaaaacaaagatccttaaaatcacttgggaagtagtctgggctggaaatacagatttgggactcatcatagatcaccctaggaggatatactagggtgtctagcattgcatccaagaaacagtgtcatggaagagtctgctatgagaaccagacttgtggagtcatgatagctaaggggatagaagatgtcaggtagagggaatggacagtactggactgtagccccaaagtccagttaagtaactggaagatactcagtagaatgtgccattcagttcagttcagtcgctcagtcgtgtccaactctttgcgaccccatgaattgcagcacgccaggcctccctgtccatcaccaactcccagagttcactcagactcaggtccatcgagtcagtgatgccatccagccatctcatcctctgtcgtccccttctcctcctgcccccaatccctcccagcatcagggtcttttccaatgagtcaactcttcgcatgaggtgaccaaagtactggagtttgagctttagcatcattccttccaaagaaaacccagggctgatctccttcagaatggagtggttggatctccttgcagtccaagggactctcaagagtcttctccaacaccacagttcaaacgcatcaattctttggtgctcagccttcttcacagtccaactctcacatccatacatgaccacaggaaaaaccatagccttgacgagacagaccttagtcagcaaagtaatgtctctgctttagaatatgctatctaggttggtcataacttttcttccaaggagtaagcgtcttttaatttcatggctgcagtcaccatctgcagtgattttggagccccccgaaataaagtctgacactgtttccactgtttctccatctatttcccatgaagtgatgggaccagataccatgatcttcgttttctgaatgttgagctttaagccacctttttcactctcctctttcgctttcatcaagaggctttttagttcctcttcactttctgccataagggtggtgtcatctgcatatctgaggttattgatatttctcccggcaatcttgattccagcttgtgtttcttccagtccagcgtttctcatgatgtactctgcatagaagttaaataagcagggtgacaatatacagccttgacgtactccttttcctatttggaaccagtctgttgttccatgtccagttctaactgttgcttcctgacctgcatacagatgtctcaagaggcaggtcaggtggtctggtattcccatctctctcagaattttccacagtttattgtgatccacacagtcaaaggctttggcatagtcaataaagcagaaatagatgtttttctggaacactcttgctttttcagtgatccagcggatgctggcaatttgatctctggttcctctgcctttcctaaaaccagcttgaacatcaggaatttcatagttcacatattgttgaagcctggcttggagaattttgagcattactttactagccgtgtgagatgagtgcaattgtgtggtagtttgagcattctttggcattgcctttctttgggattggaatgaaaactgaccttttccagtcctgtggccactgctgagttttccaaacttgctggcatattgagtgcagcactttgacagcatcatctttcaggatttgaaatagctccactggaattcaagttctttatttagtaagagccatttcttcttcatgacatgaggaatagaagccagattataaaagcatgtggagagagagagaatgagcgaaggctgtgttttggaaaaattagaagatgatgtataggaaagggcttagatcatagcttatttgttttatttattagtcagttatataggctaatagggttgtgtgcagaattttagaatgtggaacattgtggaagggggtaacatctaattctgactgtcttaggtggagaagggtgtttaatcatggaattttatacctgtataacatatgtatattgtatttaacatttatataaaccttttttgttttgttacagtttatgtaaaacttctttagtaatacagcatgcatattatactgattttttattgaatgttttaaaaaattacagggaattccctggaggtctagtggtttggagttatgcttctattgcaggaggcatgcatttgatgcctggtcaggaagatccccctggagaaggaagtggcaacccactccagaattcttgcctggcaaatcccatggacagaggagcctggtgggctacagtccatagggtcgcaagagttggatatgacttagcaactaaaccaccatatatatctgcaccaccaccacagagaactaagatcctgcatgccacgtggtgaagccaaaaaatatatatatgtaaaagcattaaatatttattggaataagtcggtaatgcagagatgataagtaaaaaggtgataatctagcctcactcctcgagataaccagtgttcaccatttaaattaattcttttctttgttctgtacttataaagacatttttctcacttcagaggaaaggtgattcagaccattctgctattctttttataggactttgcccatgctaaacagctatttgctgcttgtttggagttggtgacagaattctcaccaaaacttcgtcaggtcatgctgaatgagatgcttcttctggatatttatacacatgaggctggaacagggcagtcaggagagagacctccttctgatcttattagtagggtgcgaggatatctggaaatgaggcttcctggtaagacactttcacaaagccagatttcaggactttagtactcaagtaactgtggggaagattctaaaagaatatttacaggactttttaaccatcaatgaaaaacttttcttttaaaacaattcagatgtggagttcactcgagaacattgggggtagtgtcgaaaactgttctaggactgccatatattagtaccaaaaatatgtttgtttacggttccggcgatgagatgtctgaaatcagggggtctgcagggccgtgcttcctttgaaggctgttgctcctctgttgtctctagtggctcccagcggcctttggcattcctgggcttgcagctgcatcacttgtccttgtctctttcatgtggccttctcgtgtgtgtgtgtgtgtgtgagtgtgtgtgtttgtgtgtgtcattttgtctctttcatgtggccttctcgtgtgtgtgtgtgtgtgtgtgtgtgtgtttgtgtgtgtcattttgtctctttcatgtggccttgtgtgtgtgtatgtgtatgtgtggcattttgtctctcacatggcctcgtgtgtgtgtgtgtgtgtgtagtgttttgttgctttcacgtggccttctgtgtgtgtgtgtggtgttttgtctctttcatgtggccttctcgtgtgtgtgtgtgtgtgtgtgtggcattttgtctctttcacgtggccttctgtgtgtgtgtgtgtgtgtgtgtgtgtgtgtgtgtggtggtttgtagctttcacgtggccttctgtgtgtgtgtgtggtgttttgtctctttcatgtggccttctcgtgtgtgtgtgtgtgtgtgtgtgtgtgtgtgtggtgttttgtctctttcatgtggccttctcgtgtgtgtgtgtggcattttgtcgctttcacatggccttctcgtgtgtgcgtgtctgtccgtccgtgtcctcatccctgtccccatctgtcctctcgtaatggcaccagtcactggatttagggtctgccccaatacaacgtgacttcattttaattaacacatcttcaaagacccactttctgagtacgatcaccttccgaggtttcaggtggacataaattctgaggggacacctctcagcacactgtagaaattatattgcagttttaagatattctgttagaagaatcaaaatgtccttgaagctgcatgttgaaggtttatttcctcattgctgccatagacagccctcaaaatgtttgccagcgggtcagaaactcacttgtgctcactttaggaacaggtttggccggtctgaaaatgtcttatgaaaaggggcttaaataagaattatcacctctgttacatataatcttgcttaattaaagaagtttctgaattttacatattttaatatttagagcagttcaatcgtactgtacacatttaatactataaacagtaaaatttatgttgtagaaatatcaaggaaggtgctaataaggtgtgcaaacaaatggctgctggttttctgggatctgttgaattaattgttaataacattgtgttttcttaaagacattacaactttttagcactctagagatagaattcctttgagttttaatgtcagtgcccttcagtcttaataagaatgatttaattaatatatgctgtcaacagagtgttttctttttaaaggttgaagattggttttttcatatgtgatttctctgaaatgaaaagcaaaaagaattttagaaatcctaacatctattgagtggtgctaactctatgtctgacattgttttaagaacttaatacataactgatttagtcctcacggcatctctatgaagtagctgcctctttaattatccctgttttgtaaatcaagaaacgaaggttaaagaatttggccatgaagtaggagacaaaactgtgttttgaactcatcagtccagcttaaccctatgcctttactctttgaaacgattggaaacgcctttgtataattacagtctctttgtgctaccttttgtcatttgaatagtttggggttcacatacttttcctttccttcatccttccttccttccctcccttggcttactgaatgttcatctgtttttcccatagtttgtgttgtgaacagtgttggaaatgagaagggaaaggatgtactgttaggaagaatgagaaaatgattgatccccactccagatgctaattcttctctaagaacagttggggactctctaatgagaagtgcccagtgaaaaaggaagccttagagccagatgctgtctggctttcctttggcaaagtatatagtgagcagtgcacagtgaaacgttgtgcactgggatattaaatttacttctgtcttcattccttctttaagaagataatgcagagtgtattcttattaatttttctgtgttcctatgtctcttttttgttgtttccaattgctttttggaataaagtgagttattaaacaaatagccccaggtacagacttttagaaagactcaaaaatctagctgtccccattttaagtgtcagcgttgttatttagtattcaatgggtttattttcctctttcttgaaatacattaaaacctgactattatatactttgagctataaaaattcaagtgtatttaatattatatttatttcaaaggaaataattgtcaaacagttctgagtgacttttttcctcatatctttatttgaaattgttgctggtgtaatgttttttgaagagtaaatgatttgtgtcatgcctatttatcatgctttactcagaataactattaaaaatgatgagtattaggcatcttagggtgttagtagtagagaattttgttgattagtagtggaaactgtggcagtccattattggaaaatattggactttctagaagaaaagtataaaatgttagagtttttctattttttttatctgtaactattttcatttactcaactggaatctgagcaactatttgctttgttcttttaatattatggtagtaattctaactacttttttctttgctttttagatattccttttcgtcaagttatttctgaggagtgtgtggcttttatgttaaactggagggaaaatgaataccttactctgcaagttcctgcatttctactccagagtaatccgtttgtgaaggtaattcatgtttaaataaaagaattattagggtgggattattggaccagtttctttagatctgtactccttagagaacttgtccagtttctaagattgaatataagtgtggacaaatacctattgggttgcaggtaagagtatagtttttgataattaaggcacttgagtttgccctctcttaatattttttttctagtaccatatagttatgaaaatttaagcaaaaattatttagttaacagacaacattttggtataatcctaaactagtgagaagttagttagtttttcttgctttgattgatgtagccagaccctgactttagctctggagtacccggggtagaactgagggagccgccagggatgaactgcagccgtttccatgtgagcaccttcagttcagttcagccactcagtcgtgtccactctttgcaaccccatgaatctcagcacgccaggcctccctgtccatcaccaactcccggagttcacccaaactcatgtccatcgagtcggtgatgccatccagccatctcatcctcggtcgtccccttttcctccagcccccaatccctcccagcatcagagtcttttccaatgagtctgctcttcgcatgaggtggccagagtattggagtttcagctttagcatcattccttccaatgaacactcaggactgatctcctttagaatggactggttggatctccttgcagtccaagggactctcgagtcttctccaacaccacagttcaaaagcatcaattcttcggtgctcagctttcttcatagtccagctctcacatccatacatgaccactggaaaaaccatagccttgactagatggacctttgttggcaaagtagtgtctgcttttgaatatgctgtctaggttggtcataactttccttccaaggagtaagtgtcttttaatttcatggctgcaatcaccatctgcagtgattttggagcccaaaaaataaagtctgacactgtttccactgtttcccaatctatttcccatgaagtgatgggaccagatgccatgatcttcattttctgaatgttgagaaacatttcactttcatcaagaggctttttagttcctcttcactttctgccataagggtggtgtcatctgcatatctgaggttattgatatttttcctggcaatcttgattccagcttgtgcttcttccagcccaacgtttctcatgatgtactctgcatagaagttaaataagcaggttgacaatatacagccttgacgtactccttacccttcctcaaagcctgttaaactctcttaagttgatgcctgattcttattagtatgcttgtgaagttgctttagttgtgtctgactctttgtgaccctatggactgtagcccgccaggctcctctgtccatggggattctccagggaagaatgctggagtgggttgccttgccctcctccaggggatcttcccaacccagggatcgaacccgagtctcttatgtctcctgcattggcaggtggattctttaccactggaagccccttattagtgcgcatgtttgttattagtaattatttccacgtgaaagaattcattcagtgaattgatggtatgttgtttattttactttcttaattgtctctctcctgtaccactgaaagtacttctctgtgcagagaacttgaaaaatatggatgtgttttccctaagaaaatgaatctttcatttgttaattctgtgtttgccctgaagaagcagtgagcttttctccctttctggtcttacagtttaaaaaaaagaagtttcatgatttaagacttttaatgtatgcatctcatcccaagtttctttgttcttttgtaaaaatgcttatttatttatctttgttgctgcccttgggatttctctggctatgacgactgggggcttctcatcgtggcggcttctcttgctgcagagcacaggttctagggcgcacggcttccgtagttgcagcttgtgggcttaggtgccctgcggcacgtgggatcttccctgaccagggatcatacctgtatcccctgcattgcaaggcagattcttagcttctggaccaccagggacacccttattcttttcttaatgcttgtattaccttttgtggttcttatctgccctcatctcatctttagtacatagtcccttaaattgatgatggtatctgggaaccttgcaagattgtactagttttttacatttgtcttcagttatttgtttcttctttcttatttcatgtatgtcctttgaaaaactgagctcattttatttcagccttttggagacttactgattttttggttttccctccttttttgttttcttcctgattgttcataaaaatatattgttgtccctgaattatccttgtctttgtatttcacactttggattatatctgtgtttttagtcaacttcatgagatgggaggtcctcatatttagggagtttttctgattatgcccagcagtcccttaggctttagtaagccctcagatgagagaactgttttgtctcaagatggtcatgtccactgagaatggtggcttggtattaaggtggtactgtagcttctttctttgttcatcttagcagtgagttcggtggagccatgcaccagagaggtttgtttgcgtgtttgagggcctgcagtgcagaaggctgtgctgtcggttacctcaccctgggcctggttagcccctgcttcctgcacttccccctctgtctacagagggggaagggtaaggggtgaccttgctgcagggccactcaggggactcattgtctcatctgggttagggttttgggtgcctccttccttagctggcctcttgttcccttgttagcatagaggagaaagtagagaaagaagtctagagtgtgggatgtgtattaaaaattatacagagtagagcacctttcagactttgaatttcatgtggaatattaatacacatgcatagggaagagtctggaagggtattaatagtcattatccctgggtagtgaaacagtaaatgatttaaatcgattttattttccattctgttacatattttatttctttaagtatccgcttatcacaaaaaggaaagaagctcttaggcatgtgactaaagacctttcgagatagtaaaaactgtccagcctctcttgcggatcagggtgggggtagtgtagtctaggaaaatgtatagtgttgacgggcacttggattataggaggctggctggtgggaggaggaggagaggttagtgctcacttaggtcgcagtggtgtaggaaaaggcctggcttggaccgagcctgccagcctcttacggaacgagagcctctccttcctggcctgccctccagcctgtccgcagtgccagcgcgctcccagccccgtcctcacggtgcttcctcatgctcctgcatttctgccggggttcattctggatcctgcgccaccttaggtcctgaaggctgcctttgttcagatcagtcccttttagtaatctgtgcttccttaattctgcctcctcacatcaacagtagttacgtccccagtcgctaccatttccttagagaaaagttgctctaactcttgttcttctgttctgccaacttcagtgtccatattttttcctcattttttttcattaaaaaaaataatatgtgggtgtgagtgaaatttaatatgtgggtgtgagtgaaattttaatctatctctgggcttttacaggtaacactatcctgtatatattccattacaggctttttttttccaagtgggatcatagtaagtgtatttagcaacttttttcccccacttaatagcacgtctcttgccttgtttcacttttatcctcattagactatgctgtttttgttctccttagactggttgtttagaaacaaggtttgtaatgtggtggaaccagagggtcctcttcccagatctaattcagatctgtcagtggacagtgagctccgaattccccagtggtcggatagaggccagcatcaaacaaccgcgcttcgtatgtgcgggcagtttcgatctttcttcaaatgttcctgagtaatagaaacagcatgtatgacattacagattgtcttctgtgtgttttctgtttttcctgttatagcttggacagcttttagcagctacatgcaaagaacttccaggccctaaggaaagtagacggactgcgaaagacctttgggaagttgtggttcagatctgtagtgtgtccagtcaacacaaacgaggaaatgatggcagagttagcttaataaagcagagggagtctacattaggtataatgtatcggtacgtttctatccgtttattttttaagttatttatactattttgtactattttaagaacgtctgtcattatccttgtgtatcataaaaatggacaatgtaagaattctttgctgctgatctcggatggacttgtctaatagcaccaacttaggaaatacctgtgtattccctgtcaacagtgtctggttggatagtactgaagatgtcacatgtaattaaaacaggaaagacattttattaggttagtataacaatagaatactatactcttctatacatgcagaactgaaaagttaggactagaacttcacctagaatttactttcttgtttttattttgaatttctggtattaaatgtatatacaaaaatttgtgtctttgtaggagtgaactgctttctttcctcaaaagattaagggtaagttttgtaaaagtgggtctaactactattgctgattctgaggatatgataaaaaaaattattgagtgttaaaatgctgattaagtaatctgttaatgtgctttttatctttggtgatcatttcttttgaggatgggatagtctgaatagagaagttttttttgcatttaccttactctgttttagtgagtagagtaggtatttttaagttgtaaagaagtcttcgtaatagggctagatgtctgaatcctaagtttttgataggattaatatcatatttgtttattagacatagattccactctttaaattccattctataaacagctgtgccacacagcttgtgggatcttcattctcccaccagggatcaaacctgcgccccctgcggtggaagcatggagtcttaaacactggaccaccaggaaagtccctgaatattagtttgaggaataaaaaggcaattttttttagaggtagctggaagtactagtgggaaggagttcttttaattcaatttcaaaagacgtgggaggacagacacctaaatttggtcatttttttgttaattgtgtgttgtgatttctttcatgagattaagaataatgttaatctctagtgtactcctaactaaagcgggtgataactttcaaaagggtaagaatcttttgacggaaagtacttggtatccttgaggctgatagagaaatattaagatgtatataatatttaaggattctttattttctttctcgtaggaaccattggttttgactattattttgtcactctttgtgaaacttcacaacgttcgggtcagtatttcataatttcatctaaaaatttttttgaaagttctttataagtcacactctttttttttttccttttttttttttaaataaggaggacattgtgaatgatattacagctgaacatatttctatctggccatcctccatccccaagtaagaagtattatagcttacattttattaaattgtttaatatatatatgtgtgtgtgtgtgtgtatatatatatatatatatgtaaactatcctgactgatatagataaccttgaataacttgattaaaagactgcagttcgttgcgactgtatagcaacttcatattgctctattacagtaatgatcttcctaaaaattaagcatcaggcataactaagtaagagctgaagtgcactagccttaggttgaagctagacagtctctcaagtagtcccgatttcttgtcagtggtggaattagaaaatggaggctaataaaaggatgacattctacctggttttcctaatactgattgtcagaggtccccacctctttttcgttaccttaagaaattctttagttactttaagaactcttctcttttccttttaccacctagaaccacagtaagagaaggacaacaaaggggagaagacagtgttcttccttgtgtggaagaagaaactgttcacatttttctcttcccacagacgccagcttcttactcaggagagcccgtttgtctcctcaaagaaatgactcttccttttctcccctagcccctatcatcttctttgtgcctgaagggcaggcacagaaatctaagccatattttattgctcttaataaaggcatttctgaagaagaaaagattgtagtaggtaggtaaacagtctcagagatgggaagctctctcagacggattttggaagacccaaagtgtgagtgacccttggctctacttacgaggcttggttcccaaagcagcaccgtgcttcctgaagcgaataactgcagattttttatgtaaaataacagtcccttcatcaggtagagatcattttgcttttttttttttttgactgtgctgagtcttcattgtggtgcacaggctttccccagtgatggtgagggggctctgattgcagagtgtgggctccagagcctgcgggctcaccagttgtggtgtgggggtttagttatgctgtggtatgtgggatcttagttccccaaccagggattgaacccatgttccctgctttggggtgctgggaaagtccccatttgcctttggttataataagtcttaggtgttacttcttcagcctaagttcagattataaagtactgatacagttttttcagtgtgtgtttataaatgaggcagtggcttgtcatagtggttccgagccaggttcagagagcttgaggcccagcctgtccgcttaccaggtttcctgcaacccaggtctcccgcattgcaggcagattctttaccatctgagccaccaaggaagcccttaacttatttaaataattgtaagtaaattagctgtgggcttcccaggtggctcagtggtgaggaatgcacctgcagtccaggcgctgcaggagacgtgggtttgacccctgggtcgggaagaccctctggaggagggcatggcagtccactccagtgatcttgcctggagaatcccatggacagaggagcttggcaggctcagtccgtatggtcgcaaagagtcggacacgactgaagtgacttagcacagggagttccctggtgatccagtggttaagaatctgcctgccagtgcacgggacgaggttcaggaaggttccttggtcccagaagatccctcatgccaagggcgactaagccggtgtgccaaaactactgagcctgcgagctgcaactgctgaaagcctgtgtgctctagggcctgcaagaggcagcaagagaagccagcacgagaagcccacgcacctcgactccagagcagttcccgctcactgcagctaaataaagcccacttgcaaaaatgaagacctagtgcagccaaaaataaataagttgtaaacaagcagttgtgtgcttgctagtatcaccatgatactttcccactacactgggaacagtggtgaattacggtaaaatttagctcctcagggcaacagagattgtccttgtccaagttcatctcgtaaatgatagagccaggacttgaactgtgttatgcttctgaatcaaaagcctgttttccctaccatggggtctcactgcttcggtaggagctgtggttgtgtttcctgtgtgctggcctggcttttatcctcacacttctgtcatcttattctgtgtctcagaatttccaggtttaaccgggctcagagcagctggccctgttcccctcttgttttttggattcttcattgcttccaaatgcattgccaagatgacacttggcagatcttgtccctaccccagtgaaacatctaatccagaggaattagttactctcagaagaagccacaggatggatttaaggccacatatagcagtattgttggtgtttgaacccttgttttttgtagctttctctagataatagaacttaaaaatcacttggaaaatttttatcagtgtatctccttataatgttgttgcctgcaagttatgcataaaaagtggagatagggttatatcatatcacctttttgtgctttacattgtaaaatgtttaaagatactcttagagtggcctagtttaccttctttgccttttggggaaaggaaacaaaaatcagattgttttctgccccatataaaaagttagctgatcacacgtcctccgatttagttgttttgatagttttaaaatatttactgctagtaatatttagcattgtatttatgatcacttaaactttgactcttctgtttgtttgttttaatacatgtgtgtatggatttgtgaagttgacacctaaactacgtttattgtctttcctgtagcctccaggcagtggattttgaagctgtcgcgatcacagtgaaagagctggttcggtatgccctcagcgtaaacccgaccaaccactgctggctagttattcaggcggacatttattttggtaagtgacatgtagcgctggtttgcgttttgtgtttgtagctctttgagaagtgaaaataaacacgtttcacttactattacagtacgttattaaacttgagtcttgtttcttgaccttctctaagtcttcttccaagatgaaattgagagtaattgttactgttatatgtatgcatttttctgagtctttgattcagatgtttttaattttatgttgaccaccttttttctgtttgttttttttccccatagtaagtgatcatctgaaatgctggtaaaacattcttaggaagttaaagtttagtttgcagaattgctattttaaaggttctaactatgtccagggacttgataattatttgtgttcataggaagagatttgttgccacccagttttagcagcagttaactcagggctagtcttatttcatctgtaccctcacctacatcatcctgctctcttctggattatttttgaaacaaacaatggccagttaacaaatatgtctttatttttggctgtgctgggtcttgttgccatttgagggcttttctctgtttgcaaagagcagaggctgctctccagttgcagcgcgggcttcccttgtaacggcacaggctccagagcctgggggcttcagtggttgctgcactgggctcagtcgctgtgacccgcaggttccagagctcaggctcagtgggtgtggtgcctgggcatagttgcccccaggcatgtgggatcttttggatccgggacggagctggtgtcccctgcattattgcaaggcggaatctagggaagcccaataattgccagttttaatgcttgtggttacctagccccacaaagaatttattttcaggatcttaatatctttattcagagtaaattttctgattctaaactatctcagaaaaataaggtctgtttctagtataggcatttgggaaataaatgtctccaagtactaagttctgaactagtaagtttgacaggaaatctgaggtaaaattttggctaatcagtcttagaagaaaacagtctatatagggcttccttaaagtggttgaaataataaagccaatttttctctttcttgccctggctaagtgttgcccctaggtctgtggtttgaatctgctttctcacacatgaagtaataatacctgacccttcacaaaagaggccctgtctttttagctgcatatttaataacagataatctttatctctgttttctgcttcaagcaacaaatcagtattcagcggctcttcactattacctccaggcaggagctgtgtgctctgatttctttaacaaggctgtgcccccagatgtttatacagaccaggtaaaagttgttgtgcgcttgctttcttcttaaatgtctgaaaatattctttttcctgggcctctttttgcctgagtttcttcgtttccataaatgtggtggtaactcccaaatggattgattgctctaggtcagaccaccttcatggttccagtgcccacagccattgctgatttaacttccccaaacacctcaaactcaacctctccacggctggttcagcatcttattctgacagtctctcctcctaatgaccttcccacaccagaacaaaaacgtaaacccccagtgaagtatccgtcaactttgttttgccctttgagttgaccaagcataaaccctgagtgtcatcctcttttcttttctaatccttccaccaatatccactcaacctttaatgttgattctgtctcttcaatctcaaattgtactcattttctcccagtatgctctacttactgcttaggctgccaatatcataatgtaataaatggcatttttttaatacttgcaatagtgacttaaactagaatttaaaatattttaataattaggtttttaaaattagaagttctattttttagagcagctttagattcacaacaaaattgagtgaaaaataatagagttcctctattcttcctatccctgcacatgtacaacctacctgatggattgacatcccacgtcagagtggaacatttgttacaattgttatcaattagttttttaaagtaatcagaattttgtttttataggtaataaaacgaatgataaagtgctgttctttgctgaattgccacacacaggttagtttataaaattatgatgttggtctattgtctcgtaagttagagtttatagtaaatacaaggcattgcactgggaagtattttccatgtcataattccttaaatttatggcatttaagaatttggcatgatctttaaattttttttaatagtttacagaattttaaccgaaatgaaagtgtgggttacaaaacattggcctttgaaccttagaaaagccattctcaagtatgtctaatatttaaaagtagatatgtgtgttaatcactgtgtgtgggttagtctctcagtcatgtctgactctttgtgaccccatggactctagcttgccaggctcctctctccatgggattctctaggcaagaatcctggagtagataaccatggccttccccagtgatcttcctgacccaaggattgaacctgggtctcttgcattgcaggcagattctttaccatctgagccaccagagaagttccatattaatcatcagggaaacgtaaatcaataccacaatgagatatcacttcacacgtatgaggaggcagtaatcaaaagacagaaacaagtattggtgaagctgtggagaaattagaaccttcatgtggctggtaggaatatacattggggcagcctttttggaaaacaatttgctgcctgctcaagaaagtaaacatcaaatttcctaccatatgacccagcaatttcactcataagtatataaccaacaaaactgaaaacatatgtccacaaaagaatttatatgtgaaatgtgtataacacagcacattcattattcataatagacaaaagtggaaacaacccaaatgctcatctcctgatgaatggataaacaaaatctggtagatttatatagtggaatattattcagccacgaaaagggatgaagtactgatatatgctacaacagagatgaatcctgtaagttttatgttgagtgaaaaaacagccagatacaaaaagcttgttttgtatgatcccctttatatgaaatgtccagaataagcaaatctgtagagtgagtgtaggttagtggttgtcagagactgggagaggaggtaggagggaactggacagcgactgctaatggatatggagtttttcccctggggtaggggaatgaaatgttttggaattagatagtggtgatggttgtacaattttgtgaatatagtaaaaaccactgaattttatactctgaaagggttcatattttggtgtgtgaataataattttaaaattttataaatatttaagaaagagatcagcattatgacctacatatctggttgaaatggatctgtctttaatctaaagcagactggcagcttacattttgccaaaatgagcttctgtacttgccagctgtgaaaggcctaattggatgaatatccattggatgtatgtccttgaacatttaacacttctgtcagttttccattccctttgattttctaaaccggctttttgccagcctctcattcaagtaaagctctaaaaattttatgatttaagttactggtgaaggaaatattgggcagacagacacgtgtaaggatttttaccattaaaattggatggattccatacatacgagctgattcattcagcctgacctgcaaggcctctgaagttagagaatatattcttgacatagggctgccctggtggctcagagggtagagtccgcctgcgttgcgggagagcaggattcaatccctggcttggaaatgtcccctggaggagggcatggcaacccactctagtattcttgcctggaggatcccacggaaggagcctggcaggctacagaccatggggtcaccaagagctggacacgactgagcgacaaagcacacattctggacataagagtcatgaaaaactatccctggaaaaccaggagtcactgttgacactaattacatgaaaccttttttatttttattttttccccaaacttaaacctttttattttgtattggggtatagctgattaacggtgttgtggtagtttcagctgtacatatattctcccctaaagcccccacccatccagactggcttgtaacatcgagcagagctccatgtgctatatgataggtccttgttagttagttatccattttaaatacagcagtgtgtattaccttccctaaatccctaactatctcttccccacagcaaccataagttcaatatgtgaaaccatttttaattctttgtttatgtaggtggcaattttatgtcagttcctcagagagattgactacaaaacagcctttaaatcactgcaggaacaaaacaggtatgaatggtttttaaaatagagttgaaattttctgcttaaggaagatgaaataactgaattctgtttttcagtcatgatgcaatggattcctactatgactacatatgggatgttaccattttggaatatttgacttgtatcctttcattaacatatgtgtgtgttactagaacagttcattttctgtaaattaaagaagtatttgatatcatgtattttctaaataaaacatgaagaacagaacagagactctatatcatgatatgtcatagtattaaatttattattcttaactggttcatttagatcttcatcataaaagaggagaaacagataaaagacaaattgcagtaagttgtttcgtgctttgattcttcagtgatgcacctgatttccctgacactaaaccatttcttgtctcatacagtgttggtgccctcacatggtctgcgaggtcgagagtggcctgactgctagctagtcacttgactctgctttgctaagtcctgctgccccagtacccctgccattctttgagcatgccaagaacattcaccaccgaagtgtctgtaagattttctctttcaggaacattcttttttaactttgctcaggtttctcctcagatgtcaccttcttagaaatcattactttcctgttgttgttcagtcactgagtcgtgtcccactctttgcgaccccatggactgcagcatgccaggctcctctgtccttcactgtctcttggaatttgctcaagttcatgtccattgcgtcggtgatgccatccaaccatctcatcctctgccgcccccttttccttttgtcttcagtctttcccagccagcatcagggtcttttctaatgagttggctcttcccatcagctggctgaagtattagagcttcagcatcattccaatgaatattcagggttgatttcctttaggattgactggtttgatctccttgctgtccaggggactctcaagagtcttctccaacaccacaatttgaaagcatcagttcttcagcactcagccttctttatggtccaactctcacatccatatgtgactgttggagaaaccacacctttggctgttggcaaagtgatgtctctgctttttaatacattgcccaggtttgtcatagctttctttccaagaagcaagggtcttttaatttcatggctgcagtcaccatccacagtaattttggagcccaagaaaatgaagttttgctgcttccatgttttcccattctgtttgccctaaaatgttgggatcggatgttgatattagttttttgaatgttgagttttaagctggctttttcactctcctctttcaccctcgtcaagaggccatctagttcctcttcactttctgccattagaatggtatcatctgtgtatctgaggttgttgatattttaaagcttcctatttggactaaactctatggccattacttagaggcgacagagtgacaacagcatctttaaaaagagagaaagagacaagagtatgtcgtgccagttccactttattggaagctgctcactctttcatttacaacttaaccagggttggaaggtaatgctgaaaatttctcagtaccctgatgagatatccagattacctctaattttatcattttttaagccccttcttggaagcttaaagctacctccttattagctcatctaaacgctaacctagttgttcctctgcgtgcatcaaaagatatataatcgacttatccagctccccaacattccaagtttcactgtcaccttattcatcagcctccagtatccatagccaggcctttttgacagaattgctctattaagatctctctgccagtaatctgtccttttcttacctcttgactttcgtatttctcatgatcatgagatgttcaggtttcatgaccaagtcccccagactctccgccctttcccagctcgccttctttcctactggcctggagtacagcacattctggcttgtgtactccatggcctgcagccttagttggcccccgatttcctttgtccacctgccagtagtcagtggtctgccttctttttagggaatattttaggtttctctccttttcccatttacagtaacttccttgtgtttgaagtagacaaggaaaaaagactgatcagttcctgtccttgggaaactccttgggagttacggccctgtgagtgccagcttcaaattcctgtttcagatccctacttttcacctttgaaacaatcgccagctggactcagtatgttgatgctactcctttatgaagatatgtttttatgcttttgattctatcccttcagtcattctatccctttcagttggttatctcccctcttatattgtcaagcactcctgttaaacctatgaactatttcatccttaataaaaacttctcttgactatgcctctacctctttctgtcccctctgcctagtttttggaagctcttttacccagtttgatttctcctgtcccccactgttttcaagggacaccaaatgccaaaggcagtgaatacttctcagtctttattctgttgtttacacctccttccttccttgaaattctttattcctttggcttccttgacatcatttttaactccctgactcttcagccttttctttgtggatattttcctgtctaccctgaaacttgggtttttgtcaagaagttagtccttgggtatttcatgatggcccttcattctccctaggtaacctcattcacttatggatttgaccactacccacttagggtgtggtatttctctcaaatatctgcctcctattccaatttctttttaaaatttttattgggatataattgctttacagtgttgtgttagtctctgctgtacagcagagtcagtcagttatatgtgtattccctcttttttagatttcttttccatttaggtcatcacagagcactgagtagtttccttgctattcagtagattcttttttttttttttaatatgtagtagtgtatatatgtcagtcccaatcgccaaattaatccccccccacaccgttatccataagtttgttctctgtccagtttgtcttatactttggacttttttagccagttgtcttcaggatattttgtttgaaataactctggttattccccactactaggttttttcacatggattctttcatattgaaatagcattatcagcaagtcctcctacccactaacctgatgatcatttctgaatagtcttaacttccttcaggctacctttcaaatagtctcttgttttttttaaaaaaaaacttagaacttctttaaaggtaattttaagatcttaaaacatgctctcacaaaacattccatggcagaatgctactatagatttttatcaggctgaagtatttctttctaatcatgaaagagatgggtcactatatttagtgctgagcaactagctatttttacatatataaaaagtgaagcccccaaacatgaatttttatttttttgaattattttttagaatctttaaaaaatgtgtcagattatatgcaggtttatttagtgatatttttagtcagataaaacttaaatgaatttacttaatattctgaagataattccacaaactgtggtaattggtctttttcttgagtgcttctagtctttatgttaatttcttctacacctcttagcatctacaattagaggttcagttatcgttgttagcaagtaggtagttttatattatgtatactagcaaagctttgtttttgaccagacctctaacaacatcacttttctgttttggaagatcaaagccatcggccagacagaactgaatgcaagcaacccagaagaagtgttacagctggcagcgcagagaaggaaaaaaaagtttctccaagcaatggcgaaactttacttttaagcagttagttacaatttttaacttttattttttaaatggtcggctaaaaataaacagtattaaaagattaagtttatataatacatatgtacatatttagtggcgttttcttttcagacaatactgaaacatattagtttaaaaatgaaaactatacagaagacttcataccataacaatagcttaaatttataatttcttcaaaggaaaaagagtcacatgttcaataacaataaaccagtaaatctaggataattttctaatctacttttgaggctgacatttcatttttaaaaaaactagaatatttatgtaagagtagctatatacagtaagttcttatgtcaaggttttgttgctttttttttttcttaataaatagatttctaggagtcagtatacatttactgcttttctgccttaagaaaatagaagtttaggtcaagtgttaagctttatcactttgacactgtccttaactcataatgtaagaatttaaa

SEQ ID NO: 238 - DNA, 98709 bp, Hippotragus leucophaeus
  source 1..98709: mol_type = genomic DNA
gataaaagtacaatgcccgtgacagccaacaccatggaactgggctgtatgacgttgtttggaaggcaagggttaaaaaggtagacgagagatttttcaaaaatcacccccaagttgttgtgctgattgaatataagtacaccagatactacagcaaggggaacactgcaaaaaaaggtcctctatttacagagtgattagagacatcatggtttctttacaaacagatgtaagaacaggaattatccactttttaaaaactctacatgtcgaccctccactattactatgatccacggaactgcctgtatcaaggcagtcttttccaaaccttatttgaccccaaaatgaatttccatcgtctctttaccgtccatggtccaggctctccagaaaagtctctgggcacaaatcctaggcgggcaggcattgggcctgcagttaaaaaggaagccatcagaaactggagcccccccaaccctgggacccctgcccacaggtcagtcgtcgctatcagacagcgtctcgtactgtgcggacagcagcggggccggctcccgctcccagatcctgctcggctggtgtggggcagccgggttggccgaggtgggagtgcaggcgacgggtgcggggggcgtgctgctgagcatccgcatggtcagggggttgtaggggaactgtgtcgagcctgcggagagaggtgagcatatctgagcggggttccgggtgggggcagaacagacctccccgctgcaccattcccaagcaaccaaccatccagaaggacacaaagccagtgagcacttgaggctgggctgctgctgaatccaagtgcaactcctggatttttggctcaaactaagactctggtaacacaggaggaagcaggaagttcggggacaagggcccagctggtcagtggcaggcagacccagggacaggctgcggagggggacacacaagcctcacaacagcactgccaccttctgccatgcctagattgtgtcattgtctccaggaagccacctacaatctaagaaatgctaaaaccagagcacacaccacagcatcagacacaagaagaaatagtcattggtctaggaagttttcaaaccagtaagcccctactctgcatgtggtgggagaaactataaagtgattaagtgtacctcaaattacgttttataataccaataagaaatttgtaactaaaggagggcacagttcagattttttcattagtgttatttgtggagttaattcctctgaaaagcacagatgaaactctaaaatccacagcaactatcccagttttactttaaaaaatagttcattttcaagatgaccgttatagtggaagtgttcattactcagtcacatctgactctttgtgaccccatggactatagcccaccagtctctgtccatggcattctccaggcaagagtactggcataggtaaccattcccttctccaagggatattcctgacccagagatcggaaaacccaagtttcctgcattgtaggcggattcttcacagtctgagccaccaagaaagccctccattattatcacggttaattcgtaatttttaaaaggttacaaaatggggacttccctggtggaccagtggttaagaacctgcttccaatgcaggggactcagatttgatccctggtcagggaacaatgatgccacaggtcaaccaagcctgtgcagcccaactactgagcataggcaacagctagacaggctgctgcaccgcaataggaagcccttgcacagcagtaagaatgatgtccaagcaccacaaccaagacccagtgcagcttataaatagtcataaaagggcaaacattaaaaataccctagacttttgtttttgtctgtaaagacagcctacagaggggtgccgggtttcttccgtgtttggtcttggttcccattggctcctaagaactttgaggacatctgtgcagaaggcgtgggagagctgaagccacaggccccagccgtgaacctgggtcaggtgccgccaccagctccccacaggtgcaaggggcctgagggcagctgtgatcacagctcttcctctctgctagtaatcaaacattcttaaaatttctcagattatgtaaattcagttcctattaagaacagtggaaccctttaaccataccataatggaaagcattttttagcagaacacctgattttaggagcagcactaaccaaggccttggcgtcagctcatgcggacctgcaccctggcagcagcccctcacctgtcgaggaaggtctgtcctcccaggcccagcccggcgtctgcctgtggtagtccccttctgagtgcacggaggagaccgatgagggccgctccgctcccaggtagccctgccccgggacaggcgatttcgatttcctgctgttagccttgctgagcagctttggtttgcaaactcctcctgaaagtggaataaactgtcattactgacacacagtagtcacattcacaaaccgaaagagcaccccagtgctgctgaccgtctgctgcaggagaaagcgggatgggagcatgaagagtccagaccctggtaacacacgagagccagaactcactcgcagcaactcaagtcagaggggtgtgtccgtcctcatgccataaactcagaaacaggtaaccaagaaacgaacgtttctgaaacatcatttctttcttagccttggagcacaaaactgctaagaagccgaaaactaactgacaaaagtcttaaatcctcactctctctgccctcatcaatctacagaagagtgaagagcggaaggagaaaatctgcacaagagaagctccttcaagctgttggacatcagctgggccgggcaagtcaaggaagccctttctgcctctccaggctgtttagttggtttgcaggactgggaagccctaactgggctctcacacagaacattaaaaggatctcagaagagatcagagcccaggtcagcagccccagcagaatggtttcaccctgcccccaatccttggggtacagaaaaaagggagaaaaagcattttctacccctctatctggagagagaagaaatgcaagtccttggtgatgaggacaatataacacaacagaaaatgggggtggggtatacttcaaacactagggggaaacttcacaatacattaaggccatttacaaacgaagctccaagaagagatcaccaaaatgaacgaggcttatgaaaaggcttatcaggaagtcaagccatgaaggaaaaggaaacactggtgcaaaggagaaatttgagagtgaaagcaacagaaaaaggatcaagacgattaaaacaatgagaagctaacagagtacaaagactatccagtgaaaaggcaactttctcaaatggagaaaataactaaggaacatctgatagaatttttccctgaacacggaaactgggaaggtgcacacccgctctggtgatcagggaatcgacacaggctgaagaacactaacacactgatgtacttactgaagttgaagaaaaaaggattctttgggcagataaaatgtcatcactaaaaaaaagggaggtggtgggggaatctagtcttactttttacacaacaatgaatgccagaagaaatacaaccatgtttacaggaggttttgagaaaagtatgtgtcttaatagtaggttggtgcaaacgtaattgcagtttcagaccgtgaattttaaatcatcataactaagctcaaacagatctttattaattaaaataggaacccttacaatcaacatatttttgccattgagaagtaagtttgtttatttctgtagtgtaaaaatctgtactttgtgattcaacgaactcttggaaagcattttctgcatcttgctggttgtggaagccttttccctgcaaaaagttatcaggatgcttgacgaagtggtagtcagtgggcgagaggtcaggcgaatatggcagatgagacaaagcttcagagcccagtttgcacgtcacagcaccagtgcttcaggagttggacagtccggctccgtggggaactgggctctgtttgccactgccagctgtagttttcggtgcatctcatcgattttctgagcacacttctctgatgtaatggttttaccaggactcaaagctgtagtggatcagacgggacagcagaccatcagtgaccctgaccttttttttggtgcaagtttggctttgggaagtgcttttggagctgcttcttccaaccactgagctggttgttgctggctgtcacataaaacccacttttcatttcatgtcacaatccaagaaatggttcattgttgtatcgaataagagaagacaacactttaaaacaatttttttgtcagctcatatggcacccacttatccagctttttcacttttctgatttgcttcaaatagctgtagaatggtcaacactgagttctttagcaactccttgtgtgcttgtgagaggatcagcttcgatgatggctctcacttggttgttgtcaacttggagtggctggccacgatgctctatcttcaaggctctcatctcctttgcaaaacttcttgaaccactacttatactgtatattcattagcagttcctgggccaaattcgttgttgtgagttgtctccactgctttatgacccattttgaactcgaataagaaaatcgcttgaatttgctttttgtctaacaccatttccatagtctaaaataaacataaacagcaagtaacaagtcattagcaaaaaaacataaagcaagaagtgtgcattaaaatgatgtgtaacataaccacatttaagaaagtattccaatatcaaacagcaaatttcaaccatgcaaaaactaattacttttgcaccaacctagtattgtaatacctgccaaactgttaaacaaaggcagcaaagaagaccttctcgagcaggaaggacctcaggacacagtagcctttttgaaaaaacagggtatgaaacctcaccaccaagaaatgccaggataaaaagactacacaacaagcagaactctgtaaatcaccaatattataacttaaaacacacacacagacatttaaaatcaataaaacttgaaggttagagcagaaattagaagacaagtgtctcatctttgagagcaggaagtgaatttatattgtcctaaagttaacatatatagggaaaaacaaaaccactcatctctttaatcattttcttatccttagtgaaatcttttgtgtgaccataacgggagaacaaacttgaaatattgctgaccttcagtttatttttaaggcataagagagattctcaacagattaagaaaaaagcttatatataaacatataaagcatagagtcatggttttttgtgtgcttataacaggatgtataatgacttcattccagtaagctaccctttttaacactagccttctatacaatgtgatcaaaaggatttttttccccttattttttttctgtggcttaaaattcttttatacggggcctgtcacttttattacaatagcaagtcactttgattcaaaagcagaatatgaaattgcatcagtattacaattacaatgtatgcacacagataaggactacatgaaaacaaaaacactgatacactggagggtgacattctgggtagaaattttcatcccttttatgtcacttataacatgtctgaagaggctgaaaaaaagttgaggtgactgagcacgtaagtgaaatgtctccatgacccatcagaacctggggtatgcactggctttttcttgggggacatggtgaagagcacaaaaatgagccccttacctgagtgaggtgatgggtccccttcctccctccgggtctcgccgctggtcaccactgaggtgctggcgcccccaggccccactgccaccggctggggcatgaccaccccgtgatcctccactttgtcgtcaaagctccccatgagcgccttccggatgatgtcctccagcccaaggttactggcagggtcagcaaaggagtggcctctggagctcacggagcctgcaggagacggcacagcacctgcctgactctgagggaggacgggagcaggaaccgcccaggacacacggcccggcacagtgttgacagcacagccccacagaggcagctaatcccccgagagcatgcgctttcctgtgttaaattaggcacccactggtgtgaaagttgcttgacggttttcttctctttttagctcaatagttctgattctctgttcatttatgttttcaacaagtacttactgaccctcaattcactttttactgtgactgcctccgtgtccctccccgactaaatgatgttcctggcatgcagccagtacgcaatgcctatttgctgtactgactgctactgtatgagttttctgaatcttacctgaggtggtgactgctggcagattaaagatctcagttcctggctgagcagctgctgtatttaaaacaaacattcaagttaattaactgagatgtgatgatcatgtgcacggaacgagataaagtctccaaaaaaaagtctacagtaaattaacattattttccatgatccactttattttttacccattaagtgaaggtaaagagaaagaattactttttaaagtaaatcagaacaggagtaatacagcccaggaaggaaaggaccttctgcagcgtcagagaaacacacgtaggaagaagctggcctcaggacaggaacccaaggttctaggaacccaagcttctaatctcacagccaggtgtgagattagatcctggggagaatgcccccgtgaaaggaacgaacatgaccacgtgtccctgctgcagttgccagggtgaggcagagatcctgcctgttggttctgttcatttctgctaactgtgcagtctgtcatttgctctatttgaatgacagcagctcagacaacctgggaagtacttgtaaagcactgtgcccaaaatggaagaagtttgggaacagaaacagtgtttctatcatgccttccaactcaaggttgaaaacttgaaaaagaatccaggaagtaagttagtagccagacaagcagtgtcccagagaagggcggccctgcaccagggagaaggcctgtccacgcagattggggtgagggggcctggatgctgactcctgggacaaggagacgggcggggaggaggcgcctcacttatgggtcagggaacagtaaaccgactgaacctgaaaacagcacaagggggtaaggagggccttgtagttctcatagaaacctggagaacaggactcattcctttcacaaatacataccattatttgtgaaatgatacaagccatacaaatacaagccattatttggctgaataagaaaatcatgttcttattggtcaaaaatggtcagatgaagacaatttcttattgttcaaccaacaataacatactggaccctgtggggttcaggttagcaggtacttcctgaggccctcagagcaaaatcacctggcagctgagtgaaacgcccattcccagatccctgcattgctctggactgacgggagtaagacaggcttacgagaggacatgagcgttcctcagaggtggggaaaggcagttctacagtgctggaggcaaaccaccatctcagagccctgctgagcaagacctggcttctgaggagacacaaaaatcggccaaagaagcagaagaagaaactggaaacagcagtactgaaaaccaagggaacagcatttctggaaggagtaagttgttcactagtgttaacagcagcagggagaacagagtcgctaagtttagagcatgaaggcttctgcagagtaaaagcactgatgtcctcagtgggaaccctgagctgaggcgaagccatcttggttgccgagggcttggacttctcaaatctagtaattaagaagtaattaagagctgggataactacacaacaagtgacagtgacactgggctaatcccttctcctctgggactttcaacctttgttaatcaccatgtcacagatccaaacataactccacctggcagttcctagttggcagggtttactgatggtggaaaccctgggttctgcagggcttccccagaaccttggatcactggatacatgtgaagagaaggggacgagtgaacctggctgatggcgtgagtgtgaaaacagtaggcaaggaaggttgtgggcatttatgggcagccctggggagggtgtcgagtgctgaactactggaggcatggactctggagctagcacccatgagtctgaaccacagtcccgccacctcaacagtcactaaacccaagcctcagtgtcctcatctacaaagtggagatgatgctagcatgtggcatggagagtgttgtgaaggtgacaggagataatccacattcacgctgacaacagggcctggggcaggcagtggtgcccgggccatgcaccatctgctgccactgccttgaggctggcaccatcctcagttgtgggaggtgtgcttcgaaggtaatccacaaagactcgtagagcaaagaaaggcacaaacaagtacacacaacctggtcccacacttggtgtgacagacacaggacaacagggagaggtatgggccatgggcagctcatcgcaggaggctggtgttggtaccaacactaagtcactggaactgaacacacaggtcatcgaaacacccagtgtggtcccagacccccttaagatgatgaattggggatgggtcctaccatggtactcagaacccactgaaaggccaactgaatgaaaggtttttagtgaccagcacctgggatggtaggaatgcttaagagctggctgcctgtgcacgtccacactggatagacaactagaggagcacgaccttgtctgcagacagctggatggtctacccaaatgaggggtagaccagggggtaaacactggagagccaatccagccccacgtaagacacacacttctgagacccacacttgttcaaagagaaaatgggcagctgcgcacgtgctgggtggggctccctcacagaaagcccccaagcagagccaacggaggcctgtggaggagttcatatcacatgtgcttggaccggcctgccagagccctcatactcaagggttacgtgagaggcaacatggagctatcattatttatgcacattttatgggagttcatgaaagaaatcccacttacccatatcagagtcacctccaccagaggagttcaacttacgaaaaatctcttgcttctttgacttcaccatgggggacgtgctctcgagcttggtaaagaatgaaggcaggtagcttatgctgcctggtgagcgggagtcattcctgctgggaacagccatttgttaccaccatgcactcctactcccctccctgccccacccccaccccctgcaagtgccgggcctgaggccctctccgtctgagcactgacatatctggggccaagaggacgtcagaaaaggagccctggagtggagacggtctagaactgagagagcaaacaggtggtaacaggagccctcaaaacagcttgccatgctcccgtcttctctgcagcacagaccctggtgtattgagggtgaccacataatctgggggccatttaaccagcaaaattactttgtgtaagactgtaaccactagcatacctgcctataaaatagcaagcactcacacctaagcagtagacagttagacctaacagcacagcgacaatgcagaaataaaactgcatatttgttagcatctttccaggcctgcatgagtggagtatcatatctgcagcttcctatgctaataaatttagaaacacaagtctcctcaactagctcaggactacccaggagccaactagtgccagagacggtaacagagaacacatgaaaggtgctgataacctaatcgggtccatcactcaaacgtgacaaagaaggtaacaaaaaaatgactaagacgtcgtctctgtcctcaaaaactcacaagcttaggggaaaacatgtaaacatataattgaagttaacatcattccctttccaaaacaggatttcttcctcatttcactgaaaggtaccagcacctatttgggtacctgtgaattatataggggccaaactaaaagcgtctaaacccaatggaataaatatccactaattcacagggtgggggtaagggttagaaactggtgagaaaacagcaagcagtgctcactgcaaccttccacacactgcacatgacaccaggtgcctggcaggctcttcaggggctcaatgtccacacagacaaaaaggttttaaaaaagatccataaggaattaatttcaaggagaataatgaacaattactttctatcatctacttaaatattagaatttcttcagtaaaatccactagcatttgattgctaggaaaataaagtgattctactgacatgattgaaagagaaaaaactgcgctgacttcagggaaacggaaggcaggaagtgcgagcatgcacatgcgcacgcgcacacgcacgcacagccacgcggtgctgcccctacgcacctctgctccgtgggatcggctccacgctgggccagcagcagcacactgtcctgcttctcgtgcacaacaggaacctgaggcggggagatgggctcatagggctctgaagagatgtgactcctctctggggactttccaggcctgatgctgcaacatatgaaatgtgagactgtcttcccagggctcacctcggctcaccctaaacacacacagacactggttagctggttactttagtcatttcagggaacaaaagttgacactgaatattagaaaaaagtcacctcaaatactgtgaatattaatagatcccacttatcacaactaaagatcctgagtgccacagttaaaacccagcacagccaaatttttttttttttaatgaataaaagccatcagtgacctttaatatatgctttcattatcattataggttagtatcgtttgccatttctttccccaatctaccccatccaattagaggtggccattttttaccatttcttttagctctttgattatttagatgatttagaggtaactaccgatcttaggcttcccttggggctcagctggtaaagaattcgcgtgcaatgcgggatcgagacctgggttcaatccctggattggaaagatcccttggagaagggaaaggctacccacactccagtattctggcctagagaattccatggactgtatagtccatgaggttgcaaagagttggacatgactgagtgactttcacactttaccaatggtatatacctttcttggtgtatcaaaacttgaaacagtagctatcagtcttaccacaaaagataaaggacttgactaccttctctatattgattttaatctttagtttgtctactttatatagcctcctcagccatttttatatgattacagcatttacattgttccagaactctagaagaactcctctgtgttttgcttataggttgaaaaatcaattaatggtattttataacagtatggattatataaatattttaaactataaaacaaggtaatctcaaagaaatgtaacattcctcattcaaaagcaaggtgcagtgatgtggaaaatacaagtgaaaaagtcaaaatgatttgtttctcataaatggccatcaactgttcaaaatctatatagcactttgtatcaagaatgtatcatgaatgactgttacaactttctgttcttctttgataactgaagctcttttttgttaaaagagaatgctttcatcatgtccttaagatcatccagctgcttgagatgacttatgtcatttgcaatttacttcagaacactccagtttgaggtggggataatgaaacacatggggcctgtgctgggtgctggcatgttacactttctctacttctgtatgttcaaaaaaatcccacaataaagttttttcctaaaggagtatcgttcagcttattaaatacactgttcttactcctttatcttactttatcttgtacttactcttctctgctaacttgggggctggcaggcaggctgaagaaccaggcctgctacaaaatcaactgctgcttccactgccctggtccatccacctgccatgtgtctccagatatttgcagagtccttgacctgctgaaccccagactcgttctcatatctttatgaacttgacaaatttgtgtgctgcttgctctccatcaactaacatgcgcaccaacactcagtccactacctgcaacttcccagcgcagagccctggggagaacactggagagagccctgtactgagcagcctcacattattcaacgccagcttcttaaacatctgaacacactgtgattctgaagacccaacattaccaaccacccatgccacagcactgtctgcaaacccacagacaaaggacagcaatcaacttgtggacacataataaaaacatataggaccaactgcccagacagtggacattccaaggataatatacaaaggaaaaactctcatttacactttccagggaacgaaggtgaagaaactctgggtaagaaatgaatcccctatcgtgaaggtagagtccgactgtctcactgctggggaacctacatgtggccaagggagaccatacctggccctggatttgtctactagagtttctggagagactctcgagcctggtctctgatggtgagcagactgagactgagattctgggctgtagcggtttgatgttttcgtcctcacaggtgtagacaccaaggcagatggtgaactctggaatgtagaagtggaaggctgctggggaggctgcgaggaaacttgatttctagcaaaatcttgtgtgataatttgctgtgaatgagaaaaagaggaactggttaaatccattgagcacttgcaaaaaaaaaaaagtgtaacataaaaaaaatctagatatctttattgtgattctatgtgaaatgtggccttctatgtgatcttgtacagagaccccactaataaagagtagtgaaaaactcacgcagatgtggtcagcaagtgtgatgagccggtgtgtccggggcacctgtcccgccccctcggcttgtgaggggggcggcggcggctgctgtggggccggggactcctgctgcggccggtagtgatgcagtggtccttcatactgtctgggggcttcgtctaacaggggacagacagacggcttactgcagggaggcccacctttcactcatgagcaaagattaaacagctcagagaaacacaggatggggaattcatatcttaattttgaagaaaaaatatttattcactgagagacatcagaagattagcatagaataaaatgtgaaagcacaagtgggcaaacaaaattaataccaactattttcaatatcattagaacatattttaaaagtcactgatgacttaaaaatagtattccattgaagtgaagtcgctcagtcatgtccgactctttgcgaccccatggactgtagcctaccaggctcctctgtccatgggattttcccggcaatagtactggagtggattgctatctagactcatagaagattactctaaaacaaaactaacaaaatgagctatttctgaacatgccctggacagacaacaggaagcacacgtgaagacacaggagacccactttctgcctggctcgccttcacgacctccggctggtaggccgtcagcctctcctggggcggtgcgggagagctggcagggcttatcacctcaatagcatcgccaggtgtttcataccggtgagaagatacttgaagaaaagaaaagaatctattttaaaattaatcttatgtcaagctcagaagttccaagctcttcaaatctatttgcatattttcaggttttactcatcagaaatattcaatggcacctcaggttaatgaaaaaacaaacaaggagctcagtgcattgtggcaaaggtcagttaatcacttccttgggctcctcatcttggcaaggtacagagtttcctgaaaatctgcaggctctaaaaccttgaggtgaagcagatgagaaacagagcttgaccttctgctgggggctgaaaaagaaaatcaccaggaaattcatcacaagagattaaaccaatgagaggagacctcagcagtacatacttccaagtcacttccatccccgatagtctgctcttcttcaccaggacaacttcaacgctgtggattaacatcatgtaataattttctcaaatcactgagtgctcctgacgaaaatgactcccatttttagccccatgttacaccataaacatgaacagaggtggcggtgaatgtctgcagggaggaagggagcacgcgccatcacagcagggccctccaagagatggtgcccttgggaactgagggtctaagcagtgggggtccacgcactttcctcagtcctaccagggcctcagactcgagaacaggggagctgctggggaagggtgtgacctcctgctcaggacccttctgactcagtgctgtgcacacttttgggtgcactgaagcatctgaggaaatgatcagaggcccaaagagtatatgaccctggccagatcagcaagcgtggtcaggtcttggacacagggtagaaggtgggaaagaactcctctactagtgcatcacccactgctccaaccgcagctctacagccctctcccgcccccaccaggtcagggaagctgcaaggacctggctctagtatacttaggacagagatctggtaacaggggtggaaatcagctttggaaactaaaatatgtcactatatgcaaactaactggtactactttgggacaggcaccaatcactgttcactgtttgggtgctgctcccaaactctgctccccagggcagcacaggcggcaggaggcctggtgctcctgggagctcagtgcccttgatgtctggggcgggggccaggaagagggggtttgaggaagaagaactgaaagccacgctgggtaactgggaggagcctgggcgcttcacacaagtaatcgagtcagtgatgaaaataaaactacgctcagaaacataaaccatcagaaaagcagtcagactgcttgcagacattctgtgatgcaaaaaggaagtgatgtcaggtagttagcaagtgttccacaagccccaggatggttaccacgtgtgtgccagtgacttcccgccagacggcccagtcacacaactagagactgtcccaattttctgtaggtacagcaccgattttgcagatttccacagtccaggctaacagatatctttcatggacacatagggctaccaagcttctctccagacctcagccatggggctgtttacccaaacaagtcaggatcaggtgcagactagccagaaccttgtattgcacgccgggcagtgcacaggaccccactggtcacagtctccgactctactcgattcacgaatggaaatgagaggttactatgtgtagttacattacttcaatactaagggatatgtgtttaaatacttgccttcagaaattcaatagagaatttaggatgtagttaaaaatacatttaaaacaatttttctagcattttactgtaggttgctaaattcttacacttgctcaaaatccaacttataagaaataccaattaccaataaccataattatcaataaggtggtcttttaaaaatatctgtatcttagaaaaaggttactagtggctttggggcaccaccctagaccctgatgcacgccttaggaagttctcctgaggaacaaggtctcgaagtgcggagcgtgtgacatacccatttgcagaacctgaaatgtgagtggctctgcctctgtctgcctccctgtggcttcatccccagaaaggccaagttcctcaaggaaacacatgacagtgtacttaagatgctcagatacttaaaggcgtaacagcaggagagactttcgtgcaccactaacccacacaacctctccattacattcacaccgtgtgcttcgcttcccctggagtcaggtgactccatgtgtggtgccgtggggcgggctcgggccgagatacatacagctactggaagagtctgagctctgggagccacggtccctgctgtccttgtccgaggcaatctgccgggtgatgatcacgtctatgaagttagctgcggtaatggtggtcttccctcgagtccttagctcttcctcatatctggacttgggaggaggccctttctctttcccagcctcagagtaaattactgcagagtgaggctggggcttgccactcggcagggctgaagaggtgtacagacactgaccggctctcttctccgcctccaggcttttctgctctagctgctgctcactgactgctgccctgctcctcacattctcttctaacctggtggcgtcgtgcttactctctttcgttttggacacatccatctggggagcagatgcagcagcgtccacaagagcagccagggcatccgcagcggtgttgtaacgggaggccggcaggccctgactgatggaagggcccccggcaggcagtggcctgaaaagaaaaccaaagcacaagtctgacggggagactctcccggggtgttggggcgtcaggaggacagactgcggtgagcacagtgtgcaatgctattgcagtcacacgctgatgagcatgtgcagcagacggcacgtctggtccgagtgcacacagaggcttacatgatccgcagctgcgcgctagggtccagtggggtgatcacgctggtcccgttggttccctggaagacgctgggtctctgctgcagcagggtctcctgagctctgactgacggggatggggagcgcacatagccgtggctgctgggccggccaggctgctccgagcctgcggggcagagggatgcagggacgagccatcaggaagaggctggatggcagcacagggggtcgctgacttcctcacattcccaaacagaagacaggaaagcaagtggagaaaatcgcgaccctgctttctggcctttcgagaaatcaatgctctaagagttttccaataaagatgcaataaaaccactagtaacttgagacaaaatcgtcagctaccactttactctcattcccattcctgtgacaagtctctatcttgattccaaagagaaacaaaaaaccaccaatactgaagcactaattcaaatcaggaagttagtctctgacttttcctcatactctggtgtgtttcttatttccaaaatcaggtctggagcaactgtctctgaatcacaatgcaaatgatgagtttctgctgcagcagggccgaaggatgcccagcccgcagctccgtggctcctccacttgaccatggctcctgcagcaaaactccttcactcacaggacctcaagttccttttcctcactctctcctccacctcctcaggctctcagactcactctttctcacttgaactggcagttctagaaaacagccattttttttcagagcaggtatcacttagcacagccattccagcaattctttcctgtctgaccacacagcagtttatgtgagcattcccacaggagtgcattcctaggactggattattgctcttattttttatgtctctgaaaaagttatccctgtttatactaccactgacagtgtgtaagaggcagtgtttcctcaaacaccacaatactatcaacctttcaaatgtctgatggagaaaaatgatgtttgctggacttaaagctgcatgttattcatcagtgggatcacaagcatttttaaaacatagttcctacagacattatgtaggatttgtacctggctctcttcagttaagtcaatttctgcagtttctgtacaacaacatacaatcaatattacggtgccagttcatgatccacttcccaggtggctcagtggtcaagaatccaccagccaatgcaggagatgcaagagatgcaggttcaattcctgggtaggaaaatcccctgaagaaggaaatggcaacccactccagtattcttgcctggagaaccccaaggatggcaggctacagtccatggggatgcagagagcaggacacaactgagtgattaaacaacaacaagaacagctcatgattcattaaagcacctcctatgatcagacactgagggatttcttttacatcaatcagacaaccttctaagcacactctgcatcctccctttacactccaacccaaatgccacacctatcttcaggaatcttctgtgagcctctgctggatggcttcagctttaatgagctctgagcccagcgttttcagacccaactggtattgctaaatccaaatgccaccgtccacacgacaccaccactgcctccgccctgtctggctcctcagcagcctatacacgcaaaggccccgctgctgtgtctgagggcatcccaccctgagcacgaggctagtgcctccacccacccggccgcaggtagaggtccgaggaggccgtggcaaggcgctcccgctccttttcccgctcccgctctctctcagcactggccgcggctgcgaggtgtgtcgagtgtcctggaaaacacacaaacctgcagcctgaggacaataacgccaacctggcaagtccatcaaacaagctttaccttcttaagtgactgaacatttttctgaaagctccaaatctgagcagtaggaagtgtgctttgttaacagtttcagtgaaaatggagcataacatgagctcccaggagctctcagaagatctagggacagacattgtagaggacctatgactagacagtaaacgaaaaacagcagactgactgggggaaagtgcccaaacacccatagaggctgtgctggcaacacgggagcacactgctcccagcagagaggggcgcacgcacacccacctggactcacggacgcagagctgtaaggtctgggtgggaaggtgatctgtgtaccaggaatatatgtgattctgtccatgggcggggtgcttgtccccccggggtgaggcactaaaattgctggaggcatgttggtcaggtcaatgattcctgctcaaaagaaacaacaaaattacgtttcaagtgttattctaaagatacagaactgcacatggctcttgggcttctctaacccaaaaataatttgcatacaggacaaatacagtgcttaagttcagcatgactctgaaagacctgcttcaccaagaggaacagatgaacactgccccaccccccacaaccgccctgtacatggcaggagagagagtgaagctggcgagaacacggcttcaaacttcaaggacatcgatctggcattgttattccagtgctgccaaaacagcctgttttgatgtatcaccctgtctgccttcaaggctaacagccacagagcctgcttttccttcctcccatcatctgcccaccaagcactagtcctgggcacagacacacacccctggtcgctgggtacgggagccccagctgctgctcccggggagacagccccctggccacgtcaggccgcaggcccacttgcatctgctgggaggtgatgtagtcgttgagaatggtctggcgcgtgttctccatcgcgtagagctgatactgactagggtagccggaggtcggtgacagctgcctctggaacaggtaagcagcggctgctgatggagagaggaagacaggcatgtagttgagtccgtgcagaatccacttgctaaacatcacccacagaaacagtaaggaaaagaaccatctgctgagctacggagcacaatcagcttctacctacctcagggttggggcggggtgggggggggacggacacaggattacggcagattctttttgtaccttgacagagcagcagtgtgaatataaacatcctaatggcagacgtaatgataacagggacgacagaccagacaaaacaagactattaacctttaccactagaacagcagctaaaaactactctcaagtagtttcactttcagtctttgacatgtaactttattagattttttacctgaagtttccaaaagctgtgtttgaaaaaaaaattattttttgtagtacagatcatctaatacaaagaaatggaaaaatttgtaacaaatggtaacattacttttgggggggggcccactgaaaatgaactgtccatgggcatttaatcagtgtgtgcgtgtatagcagagattagccaaaggaccggatgatcaatatgtgaggatttgtggacactatggacctgtcacactgactcagctctgtcattacagtgtaaaaactgccacagacaaaacaaacaagcaggcatggcttgtattctaataaaactttatttgtaccaacaggcagcagcaggaccaggccccatgacgcaggtgctgggacactgtaggtgcggtcatgagctgagcacacacagtgagctttatacagtgccgggggcccactacatcccaacaaaactgcaacaagagataatgcctctgtcctcaaaacactgataatccagcttgagctcaacaatgacaagcaaagaaaactgctataaaataaaggattatgatacacactaaatgaaagcataaacattcacttctgtctgagagtttgagtgatatagtttatgcacacattttctcctgagaagaacaaatgacaaactctcggagtgtctgctcccccttcctctagccctcccagccgggtctctcaggcgacagtggcgggtaggggtgaggctcccgccccagctctggggacaggccctgaacgatcaggcatgtgtgcgtgcctcagggacctgacgtttccaggtgacagacaatgtgatggtactgacctcaccacagtccaggagagacgctccaccacctgtggacaggaagccctttcccgggcagaacccactggcctaggccccacagacagcactgctgtgccagggaaggctgccctccagaaaacctacatgcttttacacctactaagaccatgttcactgacggtcagtggtatctgtttgaaagttccttccagctgtacttgctactacaataatgaaacaatgaaaaaactacgctgctgctttggaaagactcaatacagaatctgaattagatatggactagataattttaaaagatgaggaaaaaaatctagaaggatactgtatttattgatagattcctttggtgtgtctttaaacctcaactccttaaaaaaacaaacctggagatgtatcatttacattcggaggaactgtgaggtataaccagtgccctgactagagatcagaacactggtgaagaaagtctgtgttgtaaaataaaataagaaagcctgtgttatttaaaaatagttcttcacgtgaacccactttccaatcaaataccatcacacaagacggctttccacgtacccagtattttaattctttaaggggtgctggtaatattctgtgtcttgatttgggggcttgagctatagagtttgtgaaaatccactgaactatatcctaataacacacgtgactgcctgcattctgtactttaataaacagaacatctaaagaggcacacagccacgttactgctctgccttcagttttcactgcgcactgtgcttaccaggatccagagcccggtgaaagggcatggctgggtccaagtgtgctggcaggtggctccggtacacttccccgggggtgccgcccctgtggtgcggctcgaaggggctgtggctcactgcagggtccacaccaggcaccggagacttggctgcgacgctctccctctgggtaggggtcagggttgacttcctctcatgattagcagacttgccagaagaaattgtaactagaaaaaatggccaacaccacaaatccttaagcaagcttgttaagtaggataatgttaatctatttctcaaccattccaatacagaccatatacatatatctctttgatcttctctttctacaaaacatgaaacaatcaatcttgcagaacatgcgggcacctctgggttgggagactgccccctttcaggtcacagcccggtttatcacctaaaattacgaatgaaagtcgacgctcagtgctttgtcatctctgacctgatacactaattcctctggaccctgcccacaccaagcctccaccctctctctgcctggctgcccggctccttgctgggtcacacagtgttccctgctctgtgcttccacacagacttcctcgccagcactggcctgctccctgctccagcttcttctactctacaggacattattcagaagtttcattatctcattagtgctactgagtccaaaccaaaaccctaccagtcattaccttccactgtttcagtaactgtggtgaaacacacagaggataaaatttacaagtttggccatttcatagggtatacttcaacaacagtaatacacaacactgtgcaaccatgctgctgctgctgctgctaagtcgcttcagtcgtgtctgactctgcgaccccatagacggcagcccaccaggctcccccatccctgggattctccaggcaagaacactggagtgggttgccatttccttctccaatgcatgaaagtgaaaagtgaaagtcaagttgctcagtcgcgtccgactcttagcgaccccatggactgcagcctaccaggctcctccacccatgggattttccaggcaagagtactggagtggggtgccattgccttctccggtgcaaccatgagcaccatctaattactattttgataatatcaactttgctgtgatcacacaaacgtatgtgtggaagccgagaaatcatgctggtttatcacctcccctccctgccgcaactcactctaacaagcagagcctctccctctgcagggcaattctccttcaagaccagaaccaacagggtgtaggtttacgccatggccccgatggacatttccctcttctcctccctctgtgtggcccctccaaccgcccacgggagtctgcacataagccctcaaataaaggagtactgcgttacaatctaaaatgctcagtggaaacacttctaagggcctcagattgttcacagaccacctggtaaaaatccacgcctctcatgccccagatgtctctgcagcagcatgaacccctaggaggggcgggttctggtcataaaacagaaccgacagtaataatatttcacaattaccgagtccttcccacactgtgtgtggcacattctgccaaagtcctttcaacacatcacctcattttatctgcatagcaatcctatagggccagccttggtattacacctccagttcacagatgaggacactagagcacagaaaggctaaggaacgtgtccaactcagtgcaataagaacctcgattcaccctaagcagccagcctcatggcctgagcactcaagacagcagacacacagcagacagtgaggagagctgaccatccagaccgacttccagaaattctccggcttagctgaaaatccatgccaagcatgacctgttccaccatttctggactccagtgcaccctgcacttaatgagaacattagacattttacttgcaattatgcctattttcatgggcagccagtctcccagagcacagcagacaggctgcaagcccctggaaccaacaccaggccaagtgctgcaggggacagcatgaatggtcagatagcatatgagagcaacacaccttcagaagctctgctcagcatgggcgagccccgggacacggtgctggcgtagctccccggcgtgcgccgtgcgctggcatcctcataaatccctgggctcagctgtgctttgggagcttcatggagagtggacctgaggactgaggggccagagctcaccaccgacgtgtgccgggaccgcacgggctctcctgccttcacgtcctcatacttgcccctttctaccactttaacgttctcgggcacaatttccagtggaggcatcccacggggcagtttgctaggcccggtgatcagggacttgacattgtgcttgatggcagattgacccgagctgctgtcaaacttgatgggtgtgccctgtgggtcaaaagacaagtgttacaggcagccctgtggctgggctccatctcaggttccacactggcgtgtgccaggaaaggactgctgagtgcccatgctcccagaccagaactaaggtcacagagacctccacatttactttcaggagacccgatgtttaaaatgatctagaaccactgataactactgctgcactatggtccaaagcggatggtacctgggagatggagccttcaatgaccggccgagcgctcggcaccacctcgggggttttccgactctcctgagccaacacatcctgccgggggatctcgtgaacagagcgccccatctctttgatggtggtgatgccatcgtagggctttcctttggtgatggcaccttcaaaagctcggatgggtggactctcccttttaatctgtttggggtacttaaggccatcctcgaaactttcagtggtcgctcttggtgtgccttcaaagaaggattcaagaaatacatttggtacattaatgccactgaactatacacttaaaaactgttataacagtaaattttgtttcatataaattaccacaatataaagaaatcaatgccttgctgtttgcagtttctaatcagttttctgtttacagtaagatccttatgtaaatattcatttcattggccattatttgggggggggagttgttcaagacttaatgcatcattcagcacaatcaagagtggttcttacataatgaagatgtctgtattaaaagattaagcaactatcatcttcaaataaactatgaaactcagagaagagttatagttagggtttaaatacctaacatgtaaaaagggaagatatcttgaaaaacaggcttcacaccctgcacgttaatttcaaactactttgccccgagacagttgtgaacagaagcaaacaagcggagagttaccatgcatgatggacccagacagcacggtcctgtccttgaggtcggagtgagggctccccctgggtagcgcgcggcagatgagcccttttaaaacaagcaggcggttccagtgttagatacagcatagatgtcaactcaggcacacaactaactgttctaagaggacacacttcggacaaaagccccatggaaaaaggagaaccattttagatttgcaaactattcagaagaacatcatggaaaaaaacagtaaaagctgaagtatccacttttaaaactgtttcttttcaaacatttttgcaaatagaaaatggccaaggaagaagacatctaagttaaagcatagagaacaacactttcaaagctaagtctaaattctcagtgcttatcaaggtgacagaaaatacagagggttagggttaggaaatcactgttaagttctgaagagaaaaacatgaaagatagatacccccaaaacagataaaatacactaaagatgcaaaccaaaatgaaacacacgtaaataaccttttcagaaatttcatgttacattgccaatgaatttgaattgaggaaagtgagaattttttaacaagagaaaattcagcttatagaaaatttcaataggccttcaagactgaggaatccttaccctgcttcccatttctcatccagattaaaatagaatagttgagtcaggttaagacttaaggaaaatgaaccattcacaaaacaaaccatggtgatcatgtgatgaaggcaatgccacataatcagcacagggctgtacagctgtttttcctcctcacatgactgcaggtacaagccctcaactgacagagcaagagatgggcacagacagacgcaccagaaaagagcgagattcaaatacatctctactctgtatgttatataccactctgccggccccacaataaaaacaaatgctcgtgatgaacttcacatttttaaactcacttaaacaggatcaatctacaaattacatgagcattctaacagttacctatgataagatcaattttgtctttacttcccccttcactgtcatgtactgcttgatttatatgtagtgatgaacatgaatttaaatgtttactaatatataatatataactttcatgttagtatattaattactattacacactttatactacacgtatttataatatattaacatatttatatgtttcatttatatactgatacaaattttaggtagaaatgacagatattaaatgtaacctaacccaacaatgcaaattggctgtacagaattaaatgtatctaaacagagctctggaaacactttaccctccagcggtgctgatacgggagactccctcatggacaacccttgttttattgttccttccactgattcatagcttcttttgagactgatttcatgagctgctctcggactccttgtcccttctcgggcattcttaatatctgcagaacagacacaagcactgctcggatagagcccaaggcctattagcccaaggcctaagtaagttactttaacctcatgatctcatgaagatgatataaaaactggtcttaatctactacatacctacctctgtgtagatgatatttataaaaatgttttcattcattcaaatatatttactgagggtcaggcataaaccaggattgcagggtgtaaattaggtcgcttccctcaaggaacttaacaatagtgatgggtccaggttaactaacggcagttatcactgagtaacaggtactacagacagcaggcgatcaaactgctggaaagggatctgggcatatgaaatttgggtaagggtcactggacacagcaatgcaactgacgataatcatcgccagctgagccagggtgggcatggtggaaaaaggggagacgcatgtctgggcaggacagtgcagtttcagcacactgctcattaacagtgcacaagctgaaacttaaactcatgaccacatctaaagatgaacgtttagagacaggcattaaaacagttacatttaaggtgaatttaaattcaatactctttctaggattatcagactactatctactccttaacaagtaaaactggcattcctttaaaatagaagggggtcaaatcgcactcacagggacttgtttttgctgagcagacatttagctgtggttctattaaacagagattcttttcctaggctaaatctaatgaccacagctggcagtggggagccaccactcaggggacacttactctgggctccacgctgttaagcacttttcactgactgtctcagttaatttttcatcaaagtttcaagagaagtactcacgttaaccctttttacattacagaggggaaagaaaactcactttcccaaagccagcaggtatggggctccctgtcacatgtgacagcaccagccttggagtagagaggctatacttactatcataggataagatgtgtccacttttgccttcgtaaataacatggcctttggaggcagcttcctcccggcctttctcaggactgctctcttcaatggacagtctagaaacaggtcccttcaccaatgcctcagtgggtatgccagcctgggacagagccggggtcccctgccattcaatcagacacaggcagcatgagcatcacttcagctgacaggacacaaatgctcagaaaatgtaacctgccacaccaagcatcagatcaagccatgacctcaagaaaggccagcacatgatgggaaaccagacatgttttataaacataaagaaagactgtaccttggtccttgaaccctgtcatgcaaaacttcctaaaatgccaataggtatgagttgagtcagccttcttccccacctcaaagtcaaaccactatgaaagcacttaactctcagaaacaaaatttgtcttaaggcctaaactcatgcaaatgtaatcaagttttttcaaaatttataagaaaaagataatgacaagttgtaaaagcaagcaatttatgattttcctctcaatttctgtttaagctgaacacatgttaaaagctctgccaggcagagttgcatcaattataacttgttttttctgccaatctgcaaataatccacctttttcaatgaaacacagtagagatgatctggcttgtggtttatcatctgagacctgtcccaaaccccagaacaatgaacaactttggccaacccacttgagacttcacttctggttttctcaccagctgtggtttgggtgttgggaaggagaactgacctgggtgatggaacctcggagagacgggatgctctccacagagagtttgctagagggcgttccccgagttatgcttccttcttgaatggctcctgaggtacctggataacaacagaatcatcagccaatcacacccccacacctacaaaaaaaacaggccaacaaaaccagcccctgcttgggagagaagagaaaaaaaggggaaccgcagcacaaaaggaacagtgttttactgaaacatactttaaaaataatttcacaatttttaaaaagcactgcagaaacacacaatttcaaagttttaaaatgatttttataaggaaagaaaacttaaacttaagaatttaaaggctctaatttaagagcccatctttaaaacatactactgacttcccttaacccatttactggggaccagagtatatttctgccctacagtgtgtcttacctctgaccaccccttcgtgctgggctctgaccaataaaccctcaggctgtgagttctggcttcggggagagaactcctcctgcttgatgtagggtatggtggctgtgggccagagcaagacagagtgagctcaagtgccaagtccccgaatggtgcgccacaaaagcggctactcctccccctcctcactgacctggcttggtggcctcctgctgccgtggcagtcccagagagatggagcctgccgagggcttcgctgcctcgggggcgtaggaggcctgattaggagaaggcaagtaagtgccgggtgttccctaaaaataatgttaaaggactagaataacactgtctcttcacaaggtcaactctagagttaaggtacacgtttctgtttagaaaacttaccacccatccacccccaacaccaaaactaagtttaaagcaagaaaatcctcattgcagattggttaaattttaaaagcttttaaaaggagcaagacatcttccaaaatcaccctaaattttaggtagattgatgtgtattattaacaaattacataactgaaaacacttaaccataccctcagatgtagctattattattaactgcatttatccctcgaaaaaatggtggaggaagaacttctaaagaccctcctccacaaaggcaaccagaaaactagcaggaaggttaagaattagccctttaagagctcttttctaactctgtaaccaaagacttgtagaaatctaggaccacttattcaggaaaatggcgaactctggtgagaattgtgagctctatgacctgtgaacttgctctgctgacccccactgccagtctgcttcagcccttagaacccacagctctggtcacatgaaagtacagggggtcagtctcaggtgactgtcatcatcagactggccgagcagttctctgagagaccccacttggcaaagctgtcttgatctggcctgacggggtggggaagcaggtgtaggcttgtcagaaacaattagagtcaatggattaacttctcccctggcaaaggcagtcagagcaaacaatcaggctaaccataaactgtaagagggacgtccctagtagtccagtggttaagactccatgtttccatggcaaagggtgagggttccatccctggtcagggaactcagatcctgcatcctttgagggagactccatccctccccacaaaaaggaaaagctaaagaacaagatgtccacaggggtctgcagaggtccaacatctccctggggacctagaaggccatacacatgtgcaggctgcacaccggccaggggaaactccagaaggccatgtgtcctcactgtgtgtggtcccacctcaaggctctgtgatagcaggcagtgttgttggctgcctggttgatgagtcccttggtaaagactgggaaatttaagtccttctgggcacagagctccctgatcattagctgaccactgattaagcaaacagagatctgagtggccacatgacactgtcactcaatttggggacctaactcaaacaaacctgcctgcgccatggaaacaaagtgactgctgcatttttaagtcaatgtctcgtcataaatacttttcatttagactctggcaaataaatatgggagggagggaaaatctttacaaaacagtaaccagcagagaatctcctcagaagagaagtcctcttacctgcgagatggagcctcccagtaaaaacgatggtttctcggaagccactgtggttttggatgacgggatgagaggcggcggcggccgagtgggccgagttgttggaagccgaaccccttcagggaggttagttatcacctgatgtggagcaggctggaggacttttaaaaggaagaaaaaaattatttgaaatagtcaatttcctagtttgtgatgttccacctatctcaattatttcttcaatcacagttcaattgtaagtacaagatgaattcgagggtgaacacttctattttaaatttctttcacttagattaaatctgtatccatactcaggtcacaaatggtatctgtgacactgaaatactcaacttcctgtcaaaccagagctttcaggctgatgtccatttcagactatttctgttcagcttatgcaaacagcagtctttagtgatttcttctctctctgcaccactccttggacctcacacaggaggtgaaaagaagggtgtttcttagggacagttgatattacaactctagaaaatatacagatatgactgacagccagttatatgtcctctttgcatcttgcataatttgagaaacatttactgattctgactctcatagatatttgaatatttcttagcagggggtggatctcaagattttcacaaagtacatgtactcataggagaataggcagtcaacgtcacggtacacaggtatgaacacaaacctcccagtggcccagtgaatctcaactgaatacaactgaagatgggatacagagaaacaagaaaggaattctgaaatagcggggacatgtcctgggaacaaaccacccctgccagcagtgtaggtggatggccagcagccacggcaggagggtcggtatttacctggcgggccactagagcgggctgcactcacactgggctgcggagagagcctacacggtgacgctgacctggccgcggtactgtgcatctgtgcctcctgctctagagcacgtgtggcctcagcatagggcatataggcgactgattttcctatggaagttaaagttaccaacataagggaagaaccccagattgaaagagcaagtgtgacaggaccagcccacactgtccggaggcagatccaactctatactactatagaggtctaggttacaaaaccctacacacccaaatcttctgtgtaagcaccagtactctgacctaatgaaatccacaaaaatccaatgacaatttcttctttcaaagcacagagaacttctctgtcctctcattaggatcaatatttcacatgcaataaagatcacaacaggccaacaacggattatccagccattctatgaattcaggtataccctgaattagaggccagaatgctgaggatttcgacttttataattagcctgttgaagcccactgcttaggtattagagaaataaatgcaatcaagaagcggaagaaggatttcaaaagatgcaaatcaaaatcatttttaatggctatgcaagcttatgaattttactgtaacaatgctaatgaaaattattctaatttacctccacatgaagtataaaaataaactttaagcatttcaagggcatatcagatatgtagagtcatattaagaaaaaacacaaatatatataattttctatattatatatatatatatcatcttttctttttttaaaggaagtaaaattgacatagtataattttagaaaacaaagtaaaaaatcatctgtaacctaaaccactttaaactgtggcattttaatgtttgccatcttttattcttttgcttacctagttttatccacttgttctttcagataaatctaaatttaaatcattttgagtatgtcccccacagtgtatcactggaattttaattggatgtaaatttacaggagacttgacattttatactgagttttccaattgaggaacattgattttttcatataggtcatttttcataatttcatataattttaatagttatttttttattttgttgtgaggaaaaccatctgtttagtatacacggaaaaaaatatatatattttacacactgatttctgcagatataagaaagataaatatagatctctgtatatcaattttttctgagaaacttaatgaactttcctcttagctcaaataacttctcagttaattcttctggcttcctaggtagataatcttcccctctggaaaataacttgccttctcccttcaacagtagccctcttgcttgattcctttctcccttaactgcagtgacatggcatattcacaggtcctttctaaagagaaggtctccagcctctcactgtatagtggaaggtttgtgactggtttcaagtagagaactgactagcacaattaaaatgttctttagcttattaaggtatttttaaaaaccggaaacagtgaaagtaacgtcagctaataggaatctgtactatgggcagagcactgagactacaggaagcatctcgttaagctctcaggactaatgagatcattaacaatgtctgacagaggactgcaactgaggctcaaaagactcacaccctaactgcccaaccaaggctggagactttcctatagcagtgcagttcctggcctgagctctgagccgcagtgcagtgatggcttcctgagcactgggtacagaaatttcagatgcctctgggggcaccatcaggatgatgctacccattccttctctgactgattagtaagtgtcctaatactgtgcagatttacgaaataaaccaactacaaaagaaaatcatgtctccctttctagacaatttaacacgagaacacattatatatattcagtgaagaatggctttataagtttataaacatgcagaaaaataaatatacttgtcataagagtgttaaataaaaagatgaaattttagatggttctatatacaaccatttagtcatcacgtactcagttgaaaaaataaaaaagataaactatagtccgttgcacagaagcataaactcttattttgattggattttgttaaaacctgcattagaacttcacttctaactacctttacctgtgtcaagtctgagttctttcactgcagaaaaaaggtttccaactaaagcaggagtcaacttgtgtaaatgttactggaaaatgaaaacaccttttctctgaggctttttcaagcttttctacaaatggaaaggcttaaactgcctgtctcaaagagaaggtgaacacaatccaataggtggacaacaggtgctgcgtgttaccttctaaatgagcctgtgaaaggaaaagccagaagtgtgttcctacttcacatggacaacaccagttggtaatggtttatacgttagaactcattctcactgtatttaccattctataaactattctatgatgctgcaccgaaaatattcctatcaaacgttctacacacaagtgaattaactgcaaacatataaatgttatttgggagattatcctttaagcaaactacaaaatagctataaattcaggagagccttcagcacttattaaacaaattactggatgaacatactagctagattagctaaaacaaaacttaaccttggaataaaatgtgatcaaccacctcagtttgtagagagtcaccttgaaccaaagtgatgtcatattaactaacactttggtgtcatactgatcacataaataatgacagtttgggtttaacaccactgcatcactatttaaaaaaggataccattcagatctaaaccacatggattaatgtgactgatcatggagaaatgcaatttgcagtctgaagtctcagaacttggggctgccaatacaacccactttgtaacggagatcaacaaaaaagcctcagttcttgaaacaactatacagacatattagaatgattcaggtgttgtcagctgaataatgctaagctttagcataagttcagaaaacactacttgaatgttattttttccacattttaattctgtttcaaaaaaaattattctaaatcatttatgtaaggaatagatcaaaagacttaaattattctacaatttatcattttcatactgacagatttttctcatcattggaatgctcaaaagacaagtacttctgctaaatccatttttatcctactccatttaaatcattcctttaacatgtaattgctgagtacacattatgtcaattactgagttagggattaaggattctctagaggcaatatactaaaagctcatgagttaacaatatttcttctattttcattcaagaaatattcatctagcacctattatacatacagctagcaaaatagcacctattatacatacagctagcaaaatatctatttctgctttactgactatgccaaagcctttgactgtgtggatcacaataaactgtggaaaattctgaaagagatgggaataccagaccacctgacctgcctcttgagaaatctgtatgcaggtcaggaagcaacagttagaactggacatggaacaatagactggttccaaataggaaaaggagtacgtcaaggctgtatattgtcaccctgcttatttaacttatatgcagagtacatcatgagaaacgctggactggaagaagcacaagttggaatcaagattgccgggagaaatattaataacctcagatatgcagataacaccacccttatggcagaaagtgaagaggaactaaaaagcctcttgaggaaagtgaaagaggagagtgaaaaagttggcttaaagctcaacattcagaaaactaagatcatggcatctggtcccatcacttcatgggaaatagatggggaaacagtgacagactttatttttgggggctcaaaatcactgcagatggtgactgcagccatgaaattaaaagacccttactccttggaaggaaagttatgaccaacctagagagcatattgaaaagcagagatgttactttgccaacaaaggtccgtctagtcaaggctatggtttttcctgtggtcatgtatggatgtgagagttggaccgtgaagaaagctgagcgccgaagaattgatgcttttgaactgtggtgttggagaagactcttgagagtcccttggactgcaaggagatccaaccagtccattctgaaggagatcgaccctgggatttctttggaaggaacgatgctgaagctgaaactccagtacttttggccacctcatgcaaagagttgactcactggaaaagactgatgctgggagggattgggggcaggaggagaaggggacgacagaggatgagatggctggatggcctcactgactcgatggatgtgagtctgagtgaactccgggagttggtgatggacagggaggcctggcgtgctgcgatccatggggtcgcaaagagtcggacacgactgagcgactgaactgaactgatacatatagccgtggtgggtattaatctggttcacatttttaatagtctaagatttatatttaaaacactagcaatcttatatgtaaaactctgccacaggaggttcagtaactaaccgtttactcctggtgggacagggacaaggagtcagcagggtcagttaagcaccacagttccacttttatattaaacagtccttgaaatgcatggtgttctatagctaacagcccttatcttatacaaggtactaccaacagtctactgaattattacaaaaaatgaaaccatagtcaaagaagactttaatggtctcatattctaagtgtgttgtaccaggcagcccatcggttactatcgaccagactactactacagactactgactactaggtgccattttctaaccacaacagaagaatatactaaaatttagtaatggctccctttcttcttgttttaaaagaaattaagtgtatcatgcaccaactaaaaagaacatgcacaactcaaatctgtcatttgaagtgacaacagtgacacacaggacaacagcgctcttcaaggtgtctattacactatgcctatgttaatatagtactgctataaattatcaaactgtatgtaaaataatgctgaaccacatgttataaaacaatactgaatgtgcattcattttcagaaaggcagagatatagctagattagacagacagatgtaatgtttgcactttactaaagctgacaaggtcaagtggcttgcccacgaccatagtgaggggtaagtcaaggtcttgatcgactgtgctacacaaagttggtctcatcatatcagagatttagaatatttccctgacttgcttggaggacaggttaattctcactgactctgaaaactcaggtgaacgcaacagaaagaatggccagtacacaatcatcagcagtaaagtgaacatcacaaaattcacattaacaagaagtctactgaaaacatcaccaccatccttcagtgatcaaaaacactgacatcccttgacaatctaaccgaggttaaggtaaggaagtgtatctgtcaggacagcgccattagccaggtttcaaattcagctctgtttcccaccacctacacccgtgtcctgggcggtgcgtgcactacccaccttcccagtctctgccgggactccgggcggcaccacatgggctggtggagctccgacactctaggtccagctgctcctgccgttgacgctgttcctccaggagcgccgactcatgcatggcttttatgtgccgctggtagagggcatagccgctcacaggggtcccaatcgggatgttacacggggtgcaagaaacctacagggagaaaaaaatctaaatatgccagacaccaactaagcagccattaccatctgttgcaagtaacccttatttctatataatctgactgcttgaagtggttctaccatttttttaatcaaagtaatcttcaagctttatgcttaaaatgctaaacaattactttcagatttgaacacgagattaatcccaaagttgtgttgctgctgctgctgctgctaagttgcttcagtcgtgtccgactctctgcgaccccacagacggcagcccaccagggctcccccatccctgggattctccaggcaagaacactggagcgggttgccattttcttctccaatgcatgaaagtgaaaagtgaaagtgaagtcgctcagtcgtgtccaactcctagcgaccccatggactgcagcatatcaggctcctccatccatgggattttccaggcaagagtactggagtgggttgccattgtcttctccaaaagttgtgttaagagaaatcaaagtcagaaatcacagtatttccatctgcttttaactcaagatgttgacccctggtggctcaggtctggcccaccctcttcctgaccctcataggtgctcacacccacttctgtggatttaaacgtcacctctatgttaatggctcataagcaaatatttttgagacatttttctccaagttccacactcactgcccttaacaactccacttagctatctcaaagcacctcaaaactcacattcaaaatggagcttctcatttgctacaatgaacactctctggcttcttgtacaaaacaaaacctcagcagcttcagccagaagtctggcagccgccctggtctcacccatctcctcccctccaccaccaactccataagatgccagttctcttcagacaggccagccccaccgtccaacaccacactgccatccctcctgcctgccttcttgctgccgcctgctcctctctcacagtgtacatttctctgttttctatctctcccacctcataaagaaaagaatccaagctgctttgtcatgactatgagcatcctgggactagcagagcagactcttttagaacctgttatctaaagacccacagttttttccactgctgtaggtaggatttttcactgcactcataatacacacataattttcttgcctttgggttttagcttatatgtaaatgtgccttttccttcttttactataaatataaagcaaaatgaactgcgttatttcctacaaagagtttttcagtgtctctttaaccaggaagtactccttcttctgaattgctcatagtctatttttcaacctaacagagcatcacattttaattcttttaaatttttattatgcagaggggacatatgtatacctatggctggtaccttttgatgtatggcagaaaccaacacaacattgcaattatcctccaattataataaatgaattttttaaaattgaggcagagaaagaaacatgatttttttctatgtcttattatcaagaccaatctttaaattttctgaagtcagagattatgacatttcacaaaacacaaaaaaatgttaccttgaactcggcagaccctcaatttatgtccatttgggtaaatcaatgaatgaacaaatgtttaatcatttttttggtgagcctatttatcagaggcacacacttaacttttacatattgtcatgtgacctagggaacaaattttatcctctgaaataaagagctagaacataactaaggatcaatacccaataccagaattcaggatcaaaagggagtcaaattcacagagattaataagataaaatgcaaataaaactaggtttggaactgtatactaaagctaaccataacctctataatttattctaaacattcaacatctagatatactatttacttattcatatttactattatcttgtagcaaatcaaaacaaacacaaaactcagtaacatttatggctagagcactacatttctctttttgccttaactagaaatggatcatttcaatcaattctcacatgaattcatttgaaaaagcaatgcattcaacagatgaatggataaatcaaacgtggtctatacacacagtcttaagatagaaggagaatcgaaatgtgccacaatatgaataatcttcaggacattaggcgaagtgaaataaaacagccacaaaaaaacacaaacactgtattatgagcctacttatgtatgcagccaaattcataaaacagaaagtagaaaggtgtaggttgctgggtgcaggggagggtaacggtttaatagatatacttaaccctactgaacagcacacatcaagagttaagatgtaaatttcatgttatgcgattttttactacaattaaaaaaaaacatcaagcactgattagagaagaaatgtctctaaaggtctttgttttcaactctacttttcttattcacgttgaaaacttaccattggtgggatgacagcagctcgatgctgaagctgaggcaggtccagtgggtttggttttataggcgatgagaccagtatagacccagcgggatttaacaacgaaggcttcgaatccataggaaacattctgaaaatgcaattaaaaatgactaatcaaaatattcttattcaagactttaaacatacaatcaccataattccctgtaagttaacatgtacacacacacagacatatcacattaaccttacatatttgaatactaaggaaaaagtctacaaagctaaattttcaggtaaagaaacctaatgttaatttataggttgatattcatctgcatctaaccaacagaacaatctgaacaagggccattagagaatgtcaggtcctaatttaccgttaacataggttacaaactagtgttttgctaagatgagagggtattttttaaaacatctgaataaaccaccatcattttaaaatcaagaatttcacccagggactcctctggtggtccagtgataaagagtccgtctgtcaatgcaggggacatgggttccattcctggtccaggaagacccgacataccacagggcaactaagcccacaagcaccacaactaccaaagcctgagcctagagcctgagctccacaacaggagaagccacctcattgagaagcccatggactgcaacacagagcaggccccactcaccacaactagagaaaacaagcctgcacacagcaacaaagacccagcaatgccaaaaataaagaaataaaacaacaaaaatatttcacccataattccagcctcctggtttctcatgaaaactggggagaaacggcaccacagaggcagcactcccacgaggcaacagtaggttgagctcacatggctgcccgtgctccccacccagtccgtgctccccattcaccctctgccacctctcactgcaccacttcacttagtttcaggacccacgcttgagtaaaggatgtccagaatagtaactggaacattataccttacaggcaccatcatatttcccagtgttgtcagttactgggagaggtgaacatttgaaaaggtataaatgtgtaggaaaacgagaatgtgtaaaagaaaacaaatttttaccaaagaatcaagataatattaaagatacaaacaacagaaagtgtcattttgccagcttggaagcgaagtgaactagaggatcgtccagagagtgttaccatgtgttgataaggaacgtcagaatttcatgaccactatcacagtcagccctcaggtgctcctcccctttatgattactgccatcctaattttcccttcactcataaatttataaataagtcactaaagccaacagcacagaacacataactcttattttagatgacatatttcagtaaagcatgcttaaaaagggaccatacagcttgaacccatttatgtttaaagtttggaacagttaaaatccacagtattgagacatgagagaaagaatgctagaaccttcaattttctgaaaaaccatggttaagtaggagccctatattatttctgtttttgctgattaaaattctgttatctaccacataaaaatctccttggagaaattatgattgttatgttcaatatcattctagtattaagtcccatgctttagtatataagatgtacaatatactggaaatggaccaaaaacacagtgacaccagaacacactacagaagcagagctctgagcagaatctggctgtctcctgagagcctctttcttattaaaaagggggaaaatagaaaaaaagagctgagttgggtttctggtcaaatgacattttagtctaattcattctacagtctgcaccaatcaattcaacatggaacaaatgattctaggtactgtgattttaggtgactgcatttctttcaaggaaaagtaaacacccaagaaactgagtatactaaagaaggtagtatctactcctataaaaatttattttaacagcaattgttataaaaaccataaagattatatatctgtaatattaatttgactaaaagtactaatctgtatcatgcctgtactttaaattacaaatatgaatcatctacagttttaactgatacaaaaaggtgaccattacaatcacctctaacttcaatcagattatgctttctaacacacttttcctccagtccccatcttcgccctcagcatctctcacatctcacacgcgggcactgaggccttgctccgaggccattccatccgagggcagagctggggccccctggcccctgcctgccccttcaccaccacgtcacatggctcggccaccatagcagcaggcaactgcggttctggtcacagctctgggagctgaccgcccttctctgctattatatgggatgtacctaacaattgatatggaaagaaattaaagtctttttctttaaaaaataacgaccacacagttctttttggttaatcaggtgaccagcatcagaacccaacagtaaaagcttggttaatcaggtgaccagcatcagaagccaagagtaaaagcagacagactctctcactggccagtatttacacaggagcaaccttggcagccagcaccaccccgggttcagtctgcaaccagcagaataaagacgggggaggtcaaggagggagcctcaccgctgcctctcgggctccccgtccacgtcctcgtccgcactgcaagtggcgctggaatcgtggtcggacaggggctcaggcctcggggcactcagctgttgggccacccctagatcgtcttctccaggctccggcttctcgctactcctctgcaggtctctgtctttggggtccccttcaactctggatggactgctttctggaacccgcatttcaacatccacagcatcggccttggcagccgaggggaggtcaagagcagaagtgccttcagccccacactcctcatgctccacctccatcggctcggccgtgtccactgtgatgctatcgttcgctggggcttccacactgtcatcctcggccacttttgtgctcgcagctgccggcgagggagaaggcctgggcatggtgtcaggggtggcctccagctcggccgcggcctcagcagtccctcgagtaggcgcattttcagtgctgtcttcgccaggcttgacagcttcaactggtgaaggagaaggagcactttctgtatcagaactattttcagcaccttaaagataatgatacagcataaaaatctgataatgaacatgtgtcaggtggtgacagaagccatgcttgaaagtacttgtttaggatgggttatcctcctgtgatgacctccctgaagtgccacagcactgggaaaacaagttttctaaaaagtacaaaagggaaagctcaaattacctcagtctttggaaacagaaagcataaaagcttttaatgtccaaaaataattcatgcaaaacttgaaaaagatagattaaaaaataaaactaaatcaaaaacatttccataaaagatgatattctgatttatttctaccagtcctgtctctgtgctttttttaacccaggagagctgacattagaacagcaccatccaaagaggaacctaatgcacattacatctgtaattttcttgtggccacgttaaaaaagtaagaagagagacaggtaaaattaacttcaacaataattttatttaacccaatatgtgcaaaatattgccatcttaaatataaccaacatagaaacccagtaacaaggtgttctaccttttttagtactgtcttcaaaatttgctgtttcacattttggcccatctcaacttggtcgacagctgtcccttggtgtctgggggctactgattccaggaaaacccccacaccccaccacagacaccaaactccacagatgctcaagtcccttatataacagggcgtagtgcttgcatacaacctctgcacatcctccagtactctccacatcatctcgagatgacttaggacacctaagaaaacttctgtctgaagagctgtacaaacaatgctaatgctgtgtaaatagttgccatggtgtggaattctgctttggggcaccttctgagttttttggtttgttttttttttaatattttggacccacagctggttaaaaccgcatatgcgggatcctcaggtggagggaagattgcaatcacattttaagaactcaacaaccacaggggtgtccagtggctacctcactggacagcaaagctctaggacaatattacataggttctgtcatttaattttttgtaatgctggtctttgccaccatttgttccatctcatacatgtacctttaatgcttttacctagatataacaaaggaattacaaattctctatgtcttactctggactggtattcaactctccaagtctcaaatcaaactcttttttagagtttagtatccagcgaacaaactaggaacccaggagtcatcttccacacgctcctctcatttatttccagattctgcaccttgatgagtcatacatttctctctaaaactatacctcaagtccagccacttctgttcaatttcacaactgccatttgactccagaaatgacaccaccaccccagactcctctctaccacaaagccagagtgaatttaaaagctaaatcttaccaaaactcactcccactctctccacttaaaacatctccaggagtcttgctgctcccaggatccagtcccaagctgctgggtgtggccagcttgcgagctgccagctccctctccagccccgccttctctgtggccttctttcagttctgtgaaggtccatgcatcccttaccactgactacacacattctgaatggctttcatctactcttccctttggatagtagatcaactaccacatgctttaaaaaaagccttctatgatttcctcaacaaagctgaactttgctactgatggctcccacagtacatgtactgacagcagctacaattttacttttgttcacaattacgtgactcctggctgttgctcccatgagcctgtgaacaccatacgggcaaggattacacatttcgcttttcatttagtcctagtgaccagcacaaggccgaggtcctggcacagagcaggctcacatacctgatgcggtgtgaaatgaatgagcggctgtgaacatgtctttaagtttatgtcacctttcctctattactggacccttgggctactttcaatgcgacactgctacgaacaggacacagagatactcacttcaacattatgttttcgattattttcttaaaatagattacaagacaacacaaaaatttacatctccctaaaattaatacatataactccaatgagaatccaaaagatgtgtaagatcaatttataatttatgtgaaaaaataagtccctgagaaaattcaagaaaatcagaaaatgttatcagcatgggagagacttactcctcagacatttaaactcactatgaaaccaatgtattacgacacgtttggggctgccccagagacagacaagacagaagagaaggtcaggaacaggtcctgatggatgtgaggaactgatacatgccagagccagtgctttaaatctctgaagcaggataacagctaatgagtacaatttctcagaactggtcctttgtgtggaagaaaaccacaaatgctgccttacataatgcagaaaaagaattccaaaagggataaatcctcttaaaactcttaagaagataatctagtacgaaatacaaataacctcaagagatatggagaaatattttaagcaaaatagggaactctgatgccataaatatatcatttttatattaaaaaaagtaaaaataaaaacttaaatggtcatatgagaacaaatacttctcacacataatatttaataactcaacaaattcatgcttgcattcattcaaatatgtgcctaacacttgccatgtaagaagctgtttgaggtcctggtaactcagccgtgggagaagaaatcctatggtgaaacaggcaatgagcaataaacacttgacacatcagatagtaataaacgcagtgaatatggaactcagctgagagccagtgggtacagaggcatgggagcactcacaagacattgccagaggcccaaaggaagcggggaaacatatgccaggaagaaatgagcacgtggaaaagcccctcacgtggggttgtcagcttgggagctgcaataaggacagtgggcaaaacagagggagcagcgcctcacacctgtcagtgccatcatcagaaagacaagcagtgacaacagttggggaggacgtggaggaaagggggcccttaacgcactgttggtagaagggaaactggtgcagccactatggaaaagagtatggagcttcctcaaaaaattaaaaccaggactaccatatgatccagcaattctatgcctaggtattatctgaagggggaaaaaaaacactaacttgaaaaaatatatgtaccccaacattcactggagcactatttacagcagccaagatacagaagcaacctaagagtctatcaacagatgaaaggattcagaaaatgtggtgtgtgtatacacacacacacatatatgtaaacatataaatatatgtcatttctgacaacacagatggaacttgagggcactgtgctaagtgaagtaagtcagagaaggacactggatgatctcactcacatgtggaatctttataaagaaaacagcaccaatagagagaatagactggtggttgtcagaggcaggaggtgaagagtaggcaaaaggaatgaatgtgtcaaaagactcaaacacctagttataaaataactaaatcctgcggatgtgacatacggcataataactacagttaattacactgtgttgtaaatctgaaagttgccaagagtagacattaaaaattctcatcacaagaaaagtaactatgcaatgacgaaagttaaccagacttactagatgatgaactagactatttcataatgtacaagtactgaatgattatgttgttcacctgaaactagtgtaacattatatgtcaattttctcatttaaccacagtaaaaaagaacagagtgagcagcagaggggcctccagctttgattctgaatgagatgggagaagcatcacaggatatggagcagagagacctgacctgatttgtattttacaaggttcacttgggctgctctctggaggaaaaaaagtataatgcaacaaacagcagcaagcaggccaatccagaggccaccgcaaggaagggacagtggctctaagtggggtggcagcgatggaggagaggaggagacctaaggagaggcaccacacacacccagggggagactggagggaaagggaggcgtggaggtgagagacacaggtcagcttcagatgctgttaacccttaggtgcccaaatacaaaggttacacaagcagttagatgtgtgagcctggactcggataacagctcaagtctcaacaacaaaaacaaaatcaaaagacaaaagctcagaagagcatctcacatgttgtaaggtctaatgggcagcagcaattatggttggtgaaagatgctaccagtgttgaaaggcagacaaaaagccagactatatcatcctcattttcggagaggacaatggcaccccactccagtactcttgcctggagaatcccatggacggaggagcctggtggcctgcagtctatggggtcgcgaagagtcggacacaactgagcaacttcacattcaatttcactttcatgcattggagagggaaatggcaacacactttcgtattcttgcctggagaatcccagggacaatggagcctggtgggctgccgtctatggggtcgcacagagtcagacgcgaccgaagcgacttagcagtggcagcagcagcatcatttttattcacacagtgatggaagccaagttcgagggcaaactaacaagtcatttctcctccaaagcctggaggacatgtcagtgattatgcagatgacatcatctgacataagcactacttcagttatcttctttcaagtcacagcgctttaccaagcaccagccaagtgtgagtgtctttttcttcccccccttagaacacctcaaagaatgattcagaccaagagaaaatctaaattatgacaaaggtttggtccttctgatgtaagtcatctaattacaaaagatactcatatggtcaggcgtctatttaggaagctgacacgaagacttggtctctagcagctatctccactcacccatgtgcaagagcctgagggcacaaacccatgtggcttcaggatctccagttaagactgaccagggttcatggaaaatgcactgtgcttgctgctcttctctgacaagtgaaattaagtcaattctggcggcaagttcatttcctactaataggaaaccattctagatgtcaccattccaaggatctccctcatagctcagttggtaaagaatctgcatgggttcaattcctgggttgggaagacgacctggagaaggaaatggcaacccactccagtattctcacctggagaatcccatggacagatgagcctggcgggctacagtccactgggtcgcaagagttacacgtgacttagcgactaaaccagcaccaccagatgtcacaacacacacacaagtacaaatggcatgatgtgaccaggccagtccacactagagcccacggaagcatcgctgtaataccaggttgtaatcaacctgaccacctcatttgacagtttggaaaagcttcacacgaagacaaacaggaagaaaagagaaggaaaaagtcatttcgtggtgttcagtttttaagagtatgtcagcccatgcaacaggactccacgttctgaaataaacatacatatgacaaatagacttggcccttgttatgcaccgaactgtgtcccaccccacccccaaatttatgttaaagccctaaccctcaatgtgactgtatttggaaataatgcccttaaaaggagataataaaggttagatgaggtcataaaaattgggccctaatttaaagggcttccctggtgcctcaaatggtaaagaatctgcctataatgcagaagagaccaggttcaatccctgggtggggaagatcccctggacaaagaaatggcaactcactccagtattcttgcctggagaatcccatggacagagacgccttctgggctaaagttcctggggtcacagagtcagacacgactgagtgactaagcactaatacaacagataagtttctattttttaagccgctcagtcttatgaaatacaagtttcatgtacatttataacccaggcaatactggctaccagttacaaccctgttgaagtcagcaaaccctgaggacctctttccaaatgccagccaccccttcaggctgcttgcagctcctcagcttgccccaggcaagcctgctccagtggtctctccattttggcaataccacctcggttttcacaaaacctcacataataaagttcacttattgctcaaagtcaaaacccatttcaagataaattttaagtttaaaacccaatgacaacaatttgtagaaaaaccaaaatctagtatttctaaaactcctggaaggtgtagaaccttttaaactgaaaatgtaagcacctacaaaggaaaatgtaaacagatctaattacctgcaaagctttaattctggtaatttaaagataaaaagcaaatgagatagagaaaatatttgcatacataaaacatgaatacatttaagatataacatattaaaagctattggaatcattgtgaaaatccccacttgagaagaggacagttaaaagaaattcacagaaactgtaatagtaatgtaaactaaagtaaattaggtaccttttttaatttgaaaaaaatcaagaaaacatttactttttgaggaagttgttactaatttttcaaatagcataaaggattttacttaagtttcttgacatttttttggccaatgcctctgggccattaatacattttttttcatgaaaacatcaacatgacatgttcagctttataaatgctgaaataaatcaagctcaataaaataaagaaagaggaaaatgaaactgaaggtagtgacggaaccaacaagtgtggcaatgacagagacacactgacagcttatggacgtcagcactcagtgtctcagggaggactgccacccttcaaaacctttccaattgcagcacctggaccatctcaggagctacataaatacatgtgtgattgaatgataaatacactgtgttctcgtttcctgaatgaagcaatccctagacacccaaacaactaaggcacccatcacgcatgtgggccagcagacgccacaaccagacggaagagtggtggtaccttcactgtcctcggggttctcctcttcgttagaggcttcaatgtcctcgtcctcctgtgctgagacagtggaggccacgctttcacactgagacacgtctcgctcttcacggggcttccgtgaggcctagaagagtaaaaagactgttacttgggatttacataactgaaaggaaagaagcaagccttctcacagctgaggtgaggcagaatgcatacactagaccagcagctgcctgtccgacaagcaccctggcttgggggcagggagtcccctcagggaccactaacaggccttgtgtgcagatggatcgcttttatcaaaatgatcaaaagtcacaaccaaaccatttctggaactacttatcacactacatggacaaacagccaaagcctgaaagactcctgttcttctctccctccaaaaaatgttatttttctaataaaaataaaaattgctcataatgctagcagctagagtctcatcagaaaaatctttgagtagtgtgaagatgttaagctcatggtgagagagacacattttccaaaattttaatttttgcctaaaagctggaaatttaaaaatggcaaccaatattaatggatgttttctttcaagacaggctcattcattttcaagaaaatgtctgcaaacttttcaggtctgaaaagagtagtttttctgtcattcttaattaaaattgacattgcatgacaaaggtgaggtttgtttagcctggagctcaaacaacccaagtgtgcctttcattgagtagctaccctggcccaagacagtgcagagggctctctgccctgcccatcatcatacagacatgtgtgcaagactcaaggtttaccaaagccagttttatttgcttcaccaagggcactaagtgaaactgctgttttacaaaaacaaagctgcaactgcctggagatgaagagtgcactgagcttggcggtgccaccagagtccacactaaggtaccagcactctcactcacagcttctctgaccccatggatgcaaatgtccacatagtgggaaagggaacatcttaatattcttaggaaaacaaaatattcatggagccctcaaagggctctgtagactctgagaacactggaacttccttgttaacacattttcaataatctctaataatgtttaaataattttttctgtaacacttcaaaacttgctggtttttagtctttatcccatggagtctctgagaaaacgtcttttttcataagccagatcaactcattcaatatggtcaatagaactctaaagttttcaattcaaactccaaaatgcgtatatttttcaaatccagtttacagtaattcaaaagcactgcactgccattactactaacagaaattttactctttgggtaataaacagagtcaacttgtgccaagaaactagcatatcctttataggtaaggctacaaaaaagttttcttcaaaaccaatctttgaagcgcaaaaaacccccccaaaaaacagtaagtaaaagattcaccacctctgatacactcactttctgtttatgctgctgcaaaaggttgtcaagattgtgcctccgtttatagttaaaatagaagtttttacattgggcttcacttttagttcccaccatcttggcaattgctgcccagttacgaccatgttccactagacctgtattttaaaaacaaaccaaacattaactgaatagtcacctgatacagcaagcaagaaaaataatacagtacccctaatccttgcactcaccatcattaacactgtgttttcagttatttattgatacatttcaatgcttattgaaatgtgattgacacaaactcattaacagctctatttttctatccaaagctcaaacatgctcaatattggaagaacgtgaccctgtccttgctgtgttatctcccagaggaccaggacaatgcagacacacagggagagcccagatactgtcaactgcgtggttaggtacttctagatcctggggaacactgtatcagcacaaagttaataagacagtcaaatgtgagtaattaacaccaagtaaagacacacttgaggctccaggtataatcaacatgtccccagtccatatgcaatcaaggatcccctcaaaaatatcaaccaggttttcttaaaccttctataatacaatgcatcacaggaacctatgcaatctgacttccttccaacaaatgacacatatatatggcacacagaaacatatgttcatgaaatatgggcatataaacgcataaacacagagatgtacattaggcataggtatatccaaacaggaatttctagtgcaaattcaacaattagtgaggaaaacatcaacttttcaaggttaacaccagtagattccttcacaatgaaaactgaagatcacctccagattctgccagcgtatgacaaaagctgaaaggaaggggcatgagcagttgggtgtggggatgtgcctctgaccagaccaccctgtggccacatgggcatccatttactgcgctgtgacagtcagatgacagcaatgcatatacaaccgtcacagcaaacacacctcaaataaaaatattctgaggacagaacactctaaactgctgtattttaggcaaagtttacatgattcttaaatatgttactcattaccagctaaatagaaaataaatctgaaatgtgtcactaaaaggtcaagctatttgcaataatttctctttggaactgcaaggtaaatccttaaccctcaaaagaattggctaaattttctcaaaataattttacttaaaaagtaatttatttaaaaaccaattatttagccttttagaaattttagctaatttcaaactgtatgacctgtactttatacaggtcatttataagcaagaagagaagaacacaagacccatagtgttccagagtaaaatgaaggccatgtgctacacaagtgtcagaggcagaactccttcatctgtctggctgcaaagtccatgctctcatctctgaatcacagcacaatttcttaacagttagtaatcaaacttagccttactaactgcaaacggaggaaacagttatcattctattaaatgcaacttttaaataagagactttttatatcaaataccttctaaaacaacattaattgcatttaatcacaactcttctgtaaaactgaaagtagcttacatgctctctaacaagacattcaaaataaaatgagagagaatgttaaatccctcaaaagtgggtccctcaaacaagacacactggggtaccttacagagcaggataccgtcaaaaagaccttctaagtgtacttctaaattctgcttccattgtggaagaactttttttaattaaaaataaattagttctgtgtcactcattactaataaccctaaaaacaaacaaaaacaaacccgaagaacctgaactactatcatttaccttttttagcaacttccatttcttcttctgtccatcgagaggtttctacaggttccgtagaaactgaaacaaaggtagaactcagtaagtcagagaaaaatcatccatagattatacagcaccaagctgtaatctgttaactccaaacacacctccaaactctcaccagttatctttctaaagcatcaatctaattgcaacactcatctatttaaagatctttgttttgtaagcaaagcaggatatagtcaaaacaaagcccaccatgatctgcctccatccgcctgtctaaattatttccttcattttatccttgtcattcccagaacttgtactttcttcatatcaatacttcatgtaatgataaacttggtaccactgagccaccagtgacaggactcgtcattaatatgatccttttataaactaatgaagatagtccctaatgagagagaaaaatgcctatgcttagacccagtgtttccttgtctaagaatttattcctatgaaagttaatttaacagaaagaaaatgccatgtgaataaagtttttttcattacagtgccatctaagttagctttaaagggggaagagatagccaacatctcacagctgtcaaaagtgaaaataaagatcactcagaaactagaaaacattcataacaagtgcccagttaaaacctcagaaaacaaggtggcacacacagtaggattacaactaagtacaaaggaaacacacggtcttagggtagtgaggtcagggctggtgctctttttcagaagactttgatattacagtctaacaaatgtaaaagccagagtttcagatcgggatttctaggctgcccatatcagatgtccctcctgctgcaccccagcactgaaacagaaccccaaacaaaactgtggcccatttgctccagccctgtccactcactgggctctggcggtggtggcagaggtggcgggggctcctcagtggccgcggccgcagcagcactggctgccgcagcctcactggtcatggacctggtgatccggcccttccgacggccctggctattggcagtcttccggccccggggtgtggcctgctctctctcctcagtttcttctgctgtcccctctgtcttatccttttccttggtattttctctagaaacagtggccaaagaacattttgtgtgatttaaaagtatacatacaccaaaaagattaaagctttgaaaattcttcaaacagaaatggaactgccccccaacccccaaactctcagttacctggaataaccacttgggcttttcatcaacacaaactcaatccacccaaagacatgcccaccctccctccctgcttcctgctccctcggccccaaataccttttgttgacagaaccagcacgctcaccatcacccagtttacagacctgaccacgcctgcagctctgtcccgtactcgtcactccccgtcagtgaaccttccatctcactaacatttctcccaccacctgtgtttctatcaccactgcccatgtccagagccccagcagcccagccgcagcctttcacgcctgcttgtttgtctcccacctctccgttcatcctaaactgctcccagagccacattctagtggaagagctgtggcaggaaaccatttcagccatgctaagcctacctattcccaaacagagccacaccactccctgagtgaagtccacatttgagatttctttaaggctttacatatcgaaccccaacctcctcctgcttttctgctgaggcgtctgatgtcccagtctaatgaaactactgtctgccatttcccaaggaggcctgtccatccacgctacaccctctattgtacccacactgaccactagctcctgcatgaagtcctctagactatgcaggtggaagaaaatctcaagctcttctcagtctcccagcttctgcacatgccttccaggccattttcttttcctcccacttcgatcttgcctaattcccctcctggcctataaactgcctgagaagagcacacgtcatataggtctctacaccgtccagaagactgagctctcagaagcagtgtatgagcactcattaaacaaaccaggaattttaagaacaaagtcaaaacgagatgtggcagtaacttatgagcacttatgagtacttataaccacttgaccatgtggtgaggacaaatgttttatctgaataagtaaaaaaaaaaaaaaaacctataggtttcatcttcctaaagtacaaaattagaatggcatgagtatccaacactttaaaaaccatgacaaatgatttaggctgctttaactgcctcaaaatcagacaaaccttcagtatttccaagaagattagagaaataacaaaataaatattaaaaagaaatgaacaactacacaagcaacaactactgtgtattatttagtccatcccttctgaaacatactaggtcatatctggcaagtccatcaatccaaaagttatacttactagaatattccaccccttaattatggcaaataactactaggtgacaaagcacatatcccattgatttttctaaaatctaagattttataccttcaatagattcaatctcattattttcaaataacaataatatttaactaactcacttagagtcctccttttcatctttttcttcttcctctttcttttcctcctcttttttttctgttttttctgctttatcctcttccttttcttctactttttcttcttgtgatggtcgggcaatttgctgctagaatgaaccatcatttgtaaagttggaaagttaaaagaaatagctcctcaaattgtaatgataataaatatctatgcaacaaattaaacttattaattaatcctccacaatgtaactaggggttatgtattaaaaatcagctgaaagctctttaatacagtctgtatgtattgcttacaagggtacacacacacaaacgctccttgtgtttggatccagagaggtaacaatgttaggattccacttagaaatctgatgttgatactctaattccaacatctaatctgtcacttaaacatttcaattctgctgtgaaatttgataaactataatttatcaaaccattgcccctagtattcagttcagttcagttcagttcagtcgctcagtcgtgtccgactctttgcgaccccatgaatcgcagcacgacaggcctccctgtgcatcaccatctcccggagttcactcagactcatgtccattgagtcagtgatgccttccacccatctcatcctctgtcgtccctttctcctactgcccccaatccctcccagcatcagagtcttttccaatgagtcaactcttctcatgaggtggccaaagtactggagtttcagcttcagcatcattccttccaaagaaatcccagggttgatctcattcagaatggactggttggatctccttgcagtccaagggactctcaagggtcttctccaacaccacagttcaaaagcatcaattcttcagcgctcagccttcttcacaatccaactctcacatccatacatgaccacaggaaaaaccatagccttgactagacagagatatttaatatgttgccaattttttcatcatatggataatactacaagaaacctctttatgttgtttgtctttgggggaaacattctttaccagaatagtagacagtcatggtcattatcaagaatgaagcaatttagaaaaatactatggatacaacaaagtgaaaagtaaacactcaaatttatctaagctataattacaactaagtgactgtaaataagcatataacaaagactaggagagataagatatggacccttatatctctgatgtctcgactactagaactgttactctgagagaaaagtaaaattaagttttgtgttgagttctattacatttgtttattgaagaaatccaacggcctaactaaacaggaccatcccaggcatagtacctctttccagtctctgccccttcccacagggtctgtgctcaggctaccctcagcacacccaacattttcatgcctttgcccagaacaaagcaaaattttccttaatttttgatggaatctcaaagtcttttactgactccccaaaactaccattagctttttccttaagataatttctcttcagtcttctccagaaaatgtcctacactatgtcttcttctaaaccagatggaaagaagaatcagaacccgtcttcttcccgactgccccttctagaacactgttcaaccatggtgtttaaaatctttttacaaatttcacacagtctacctatgacacctttcttcatcatttagtgttaaggactgactctcaaagtcgcccaggaacccagagatgactttatcacatggctcattaggccttgtcattattcttcagattcaagatgctagtcactgccttttctatcaacatgatatcctgcgtgtgaaatactttcaggtcatgcccatcaaaacctcccacagggcatcaccaccaccatcttcagtgggcatgcgtcacctccaggaccctgtgatctactcacacgccgcccccaccgcatcctacctttccactgttgccaatcctgctttctgtcctcatgatcttgattctatgaaatttccacaattcatcaagaatggaatccactttcactctggccctttggttagactgtttcactatcacaactccctgctggccttatctgaccttcacagcttcacacccttctaactgcaagtttcattttcttttgagtatgcattatcaccttagagaaaactaagaaatcgggaagattttcattttttgttgttgttgttgttgttactacacattcacattctttcaatcactcttttttttttctttttttttatgttttgtttttttttttgtttatttatttatttatttttaatttttactttacaattctgtattggttttggcatagattgacatgaatccaccacaggtgtacaaaaaatcgggaagattttcaaatgcatactctccaattgtgactagttctactttacgctgggaatgtttcattcaccccaactcatgagtacgccacagtggtcacaagacctgtttcaaatgctagtaaccttaccctgcaccccacaaaggtagcattcatctgtcatctgaaccaacaagatggcacaccaatgacaaagtcagccgtctgcctagcaagtgggctgcataacccagaaacagtttacagccccgagaagtcatggggaggtgtcaactcagctgaagacagggaaagaggtccactgtcctcaggtttgaacaacacatgtaactgtattgccccaatactattctgcccctaataccaaccagggtcttcaggtaagcaaacacccccacatgccctgctgcctgaaaccagcccacagcagaaccttacaagcaaggggacatctgtgctctgcacacaccacccaccaatgcccctcactaggatctcagtcctggcccctcaccccagttgcagcttccccaacctccagcagcctttacacagctgactcctcaaatgctctatacttttcttgaccaaaaaacactgcttctgaagtctgtgagaccacatcccaagaggtggcattgctctggaggaaacaatgacccagaacacacaagatacttctgaccacacatcatgagggaacttgtatctggagatcagcgtgaccagggaaggcaggcgggggctgtggagaacaaagcacttcagagcactcatgacggcagtagccgttgtgtccacaggtgccactgtcctatgagtggtctcagggcatgtggcacacagaggagcaggagggagctgtggaggcagctgaccagctattcgaaggaaaagagcttctaaagttctgaactgccactgtgaaaacacacactgcactacattagacacaatcttctgacatcaagtgcttcaaccccagaattgaagctaacctgaaacaatcatgttccaagtattttagcaaacaacctttgactctgtagtcaccttactctacctgtccccttcacagaccaaaggactggaaagggtggtgtattcattaagatatcacagtgcttgtatttaattatattacaattgttaactctgacatgcacaatttcaatagcatgaaaatataaagcttctcattaattttggtatgccagaaacttaaaatgcattcaaaatagaaaatgcaacacattaaatatagataaacttcaaaataatcaaagcatgttcctaacattctaattaatttgatagaaaggtcaattcctaaagtataattacagaggaagcccctattataaaatttttcatctttatattccaccaaccttgatatagtttccatacaataatgaaacatacctggtttctccctctgcgttttccgtagttccttcttactagggctttataattctcatttttcttggttaagtagtaatataaaacacaatcgggaacactctataaaaaaattgaggatccaatgagattgaattttttaaaaaatcaggtaacatcttcaaggaaaatctctagtgttctcaaaatataaactggagaaacacaaatggctaagtctttaaggcatatctaggctgtaaaatatacatatatatatagtatctactgttttgatcaacaattacagcggtcttaacacagattatgtaaaagataccaggaactatcagaagcattcaagcactttcctattaaccagtaactaagttctctttcttcctctatataagtaaatattcaaaatgtctctttaaatattttgttcataaacccaacatccaataatacattgtggaacaaattcagggaaaatcagagctctgaaattttaattagaagtttaatgatgttcagaaaaacactgtaacctgtgtgttttcagggaaacatagtatcaggtcattttcattaaccatgaaaattagtctgtgttgtaaatcatcatatgattgtcaacaccactatattattcacataagaatcttttctgtgtcgagccctttgcaaaaactcaaactgcttctgtgctttagcacacaaaaccttcaaagcagcaaccaacccaaatctatcaataatctcagtgtaaaccatttcctaccttcctttccaagtaagatgcaatcagtccaaagttttttggatgctggataaacctgagtaaaagaaaaacaacacacacacacacacatacttactttaacaacttaaaaagaggtgggggaagcccttgggaatacaaatataatgtagactaattcctagtgactcctaaaggccaatgtcctcttaaagggcacagattcctggaaacagtccaccaggaactgactggattgggatacagtattgcacagatatctgtaactttcaaatgcacccctagtgattctgacaccgctcaggtttgggtaccactcttaaaacgcctccacaactctgttctaagctggtacctacatttccagctataaatttacaggaaggttgcatcctatctgtcttctctgcctcccacgttattcagatgccaaaatggggccatgttttgggggaaacagttcaatttacaagtaaatgccaatgcttttcactaactcatataagcttctattagagaataatttaaaatttaaattacttgtctttaaagatctccttctcatggtcagtccaaacattcatgaactgcctatctttataaaccttcatagggtcctccatgagcccattcatgttaatgaacttgacccgtctctgttcagcatcaaacatcataggtgggatcacagagagctgtcgcatttgtttctcattattctgaaggaaaacaaagaagaaatgcaatgtacatagaattaaagagggccacagactgactatcttaacagacactgaaacaccacatatgcactttaatgacaacggcaatggtaccataacatctaacatatgatcattatatacggatctaataaatactcattgtacgaataacagaggcagagaggcagaaagtacatgtactttttaaatccaccactacaatgtgagaagagttctttccttaaacgcagcagatacttcagctaatggatctcagacctaaaggacacacaatgatgtcagatcactgaagtaatgaccttatgaagcacttattaacattaatattgcctcattttaaaaagtctcaacatcattttatagaataataaaatagaaaaatacacagacaggaaccaaaatcttaaggtcactgattttaaattaactaaacttactgaagtatcaaacacttcttgctaatcttacataatctttccactgcaaatttaagactatcattcttcaaatttcaactaaaacttggtttcagttatataatttatattcccaaagcttaagtcagtaagtttataagcacaaacttcagtgagaaaacctgtaccaaaaattgtaactactgaccccaacacaaggctaggtcttcttctaaaactcttctcctagcagtagacactgccttagtcaactcctgacagtttctcactttacagggactctcaagtggtaaagaacccgtctgtcaatgcaggagacataagggacacgggtttgatacctgggtcaggaagatcccctggagcagaaaatggcaacccactccaatattcttgctggagaattccatggacagaggactctggagggctacagttcatggggtcgcaaagagtcggacacaactggagtgacttagcacagtctacctcagtctgtctaaacaccaaaatgtggtttgggacagacacactagcttgacatccaccttgacattgactagcttcacattcagctagtattcacctaatactagctttggttgcttacagatgccccccttatagaatcagatcaaacagtaagtaaagaaattaaattagtcatcactgcagagatcacagccacaaagcctgaaatgtacagcaatataattgtctttgattgttacttaagagggccacaccttcagaactgagagatgaggttttaaaaccaaaactagcagaagttaatatatggcttttggaccaaacttcagagaatatgaacccagctatgaagactcagtgctagaaactgaaatttattcttattcagaactgatttattatcatcatattgatctctcccaggctcagctggctagagatcacactctagacatcaccccccactccacctccaatgaacctcaggtccacaacctaacacacaaacatctgctcctttgctctttcaggaaaacggcagcagcagcccatcctctaacctgctcgtcttttcccccaactcctgtcctatccattctgccttctactaatctttcccactaataaggcccctcttaacacatttctaccactgtcgccctgattcaggcccttatttttaatcataacagcgtcctcaacctctttccaagcctccctgctgccgaagccatcttcataaaacggcaataagatctcagggcagccttgtttataaaccttctatggttggccatgtactttggaaaaacccaaacgttgtaagcattctctcatatatatacacaaataaacccttagttcatggggtatgaagctaaaatgcctactcaattaacatgaattaattaaattaattgtcttacctcctgttcagagagcccatcaataatttcagaaatctcatgttcactcctagcaatggtggctgaaagaccagctcccctctgcccaactctaaatatgagggagaaattacatatatatttaaaggccttttataaagaagttatcaattagattacttttacatcaatttgctttctgagtgggactagaagtcagggggaaaaaaccctaaaatgctattgagtaactacttttaagcaatatgtttaagtcatttatctataaaattagtaacaatttaaatgctaagatttctttttaaaggttacaagtctaaattcaaatggcagaactatttgcaggaaacatctggaaaactagttattggtgtcattttcatttcaaatagcagtcttttgtctgccttccacagcataggatagcagacttagaaaaatacataaaacatttttaaagggaggggaacaaaaatccaatcatcactcctcacaacaacttaactgtggttaccagggctttcatgactcacttacatgagacagcagaaaaggcaactaaagattctacctttgcaaaagcacttgtcctctaaagtaaaaacaaatcggaaactatgtaccaataacaaagaatttcttaattagcaaacaatttaataagacttttgattatgctgaaaggtagtgaaggaccatgaaacattgtcttattcttactatcatttcaaaaggaatgagcattttcaagaactgaagttaatttcaacatatttacttaaatttagattcaacagcatgattaaatataaaaagttattagattcaccaagatataaacattgctaattgataacaaagttttatattcaaaataaaagttcttagactcatagaggtagagaagagatttgtgtttgccaaggggcaggggagggatagattgggagtgtgggattagcagatgcaaactactatatataggatggataagcaacaaggtcccactgtatagcatagggaactatattcaatatcctgggataaatcataatggaaaagaatatttaaaaaagaaggtatgtatgtgtaaaattgagtcactctgctatacagcagagactgttacaacactataaatcaactatatttattttaaaaaagaaaaaatataactaaattctttatgaaccttcttaatggttagattcaggtgacaataaatattgtgaaagattaaaaatatgattcaaagaaaaacatcaaaccacttaccgctgaaaccgttcttgctgttctctctgttttcgaatctctggaaattgcttttcatagtactctcttgttttgctttctttagctttcctccgagggttattttctattctgtccacttttttctcccatgcctccatgagctgatcataacgttggcagattttttgttcctattaaatacccgtagcaaattaataattaaactaaactctgtgattctgacaaacctaatacttaaaagcacaggttacttcttaaggctaagtcagaaggacatttggcctatgactcaactgggaatgaaaaggtgtccttgatctgaaagaagagaaagacagggagctgttttctatgaaaaatccatatacagagcctatcattgctggatttcttagtcaacattaagactacacaaatcaacaaagtacatgctgagccactctgataacaattaagtcttcattgtcaaaaaaatggaaaatgagaaatagaaacatgtaaacagtttgtaatcccaaaggcaagcagattaacattttgttgtcacctttccatcggtcaaagaaaacacatttagaccaccctcctactgctggaagttctggttacctgcaattttttcttactataaataatgccatataatgaacatttttacagtctggaaaaggcagaaattgattgtactctgtgacaaaaagaaatccagtaaactacatgaaattgagaatgaatgcttttagagaaatgaataatgtgtgacctcattctttaaacagagaagaaagaaccctgtactgtgggcacaggaccattggtgcaaaacaacagaaagtgtgaaagggctcatgatggcccaggaggggaagagagggaaagcgctgtcctccatagtccctctgtctccttgacacccgtccacctcctgggcctgaatctacctttatttggctccaccaccaagtcaccccctcgcctccttcctacacaactcccgtgcaccctgaggtgtaactagatgcacattcccttcctcagcttaaacatttcacagatgacctcagcatctgacctcaagccccctcctgaccctcaggccatgcacaacctggcttggctcccctgccctgtcacgctccctccgcttcccagcccttcccgagcttgtacaagttggcagacggctggttttcctgtgaaacacccctcaggaccactatgtgccagctgtcccctatgtgctctcagttatctggacgtcctgaaccaccggacgaccacaatacagtaatcgcccgtggcctcatctgtcctgttcctccttagactccccaagggctaaagccacatggctatctactccctttgtagaataatacatgggttcaccttcaattattacattcaattataaggcaaatattacttttcagttataactaaacagttactgattctccttacgaatcctgatgagataaaacaccttggttcactcttggaaaaggagaaactgccaataagtatttactaaacaagtcagcgaacatacaaagttcataactaaatactcggtgaagtataagaacaaagtctggacctctatgtttgtctctttggatagcaaatttagcaattaccacaattaaaacaaaattactggatagaaaaaaaacactttagctagtttatttgtatgtgtatgctcttggccaaaaaaaaaaaaaaaattcaagactgataatttaagaaagtatctgaaggcccagactgccaaattagaacattaggagttatagaccaaataaaagctggtgacccttacaattcatcaaacaaacaggtccttaaataccaggtacaagttcatttctgatgtgaatcaaaatatatcatttattaagaaaccattcaaatgaattaacagtctaaaattattacgaacacactataaaagaacagtggcatcatattttctgtaacttaatttccatgaagattataaccacaaaatttttagactgcaagtcataataaatacaaagaataccgtgaatttgaaaaagctgaactttagctgacccagtttctaataagaaagaacagtgatgcctcatcagcatgaccataacttacccaatttgtctgaggttaagagactaaatcagatcatcctacttctctttcatattttaaactactcaccattttctttattttggctagatgaaaatgctatacacagatgaccgagaaaatttggtaatgatattaaatgtgatttatgatatcaaaatgttactagactcagattgatgtgtaagtcacatttatagttacaaatcagcacctgctctcaagtgtggtcaagaaccattctcactaacaatgggaaagcgaatgcctgaagaagcacggacgggaaagctgaacaaatttcagtgaacaaggataggacctcaccctttgttttcttgcatgatttcttcttttaaaaaataaaatgagttttttcctcatcacctggtttctagaagagaaaaatacggttgtatgacattaagaaaaagtacaatttaatagtgcattcactttgttttcagagacactgaaaaacaagcaaagatcacttaagaatatacaatataatcaaagttaatcctaattttttcaccctgcaaaacaagactcctccaataattaggactaaatttcctcccattctatagaaaggctttaacacaaagagttcattttcaactattacattcataaggcaaatattattttcaagttataacagttactgattcttcttaagaatcctagtgaggttaagcaccctggttcactcttgggaggagggaggtggagaggaggccaagctttcgcagttacctcctaacacaggtccacgctgccctgcctcctcagagtgtaccaacacagagagctgactctgccttaaacagaggctttcttcaggcacagaaacaacacagtccactctaagaagtcatgggggcaacgtgacaggacagcaatccctcccttataacttaacagtttcacttttcaaatatgaagtactgtaaccttcaaaaacaatggcatgcaggttcaaatataaatatttataccccacctacttccagaaaggatttcaagctgattattcaaatataaatacaaagccaaggcaagtagaagtaatttttttggttatctgccactctggactaacactgacactggctccacttaaataagcatgaacagtcaggagctggctatatggaaaaggagccaacagattaaagagaattactgaaagaacatttgctatttcatacaaagcaaatgatgatgatgacagaacagctactgaacgatccatacggacacatgtagctgagtagacggtacttcacaagatggtgtgcagtggaagcactgccatgtatgcagtttgctctcgctgtaattatgtgctactcaacagcaaaggacaatcaataaatataatttacaattgttcctaagaatttacatgaagaactccttctcaggacagtgtgctaagcactatagcaggaagatagctaatatgaaataaatcagacagggctgctctgcagcgactatcagggaaaagacagaacacaaacataatggaagctttgtggaaaaaaaattattaaaagtagccaactagatttttatctgctatttgcctctttaaaaatgttagaacagctaaacagttccaaaacaaggtatattttatatgttttgcctaacctagctctaagggttgtcaagaccatagcagcatctcacagaaaaattctaggtatatgacttttattataaaccacttagttaacaaaagttaagatcattcaaatttcagtttctgtcatgcatactaccatgcaaattatatttgccaccagttctgcaaagtagccaactattgcatatactctcagtaagaaaaaatttttttaattatatatatatatatataaatataaatgtgctcattagtaatgtactagtaaataagtataatgttctggttatagttaataaaacataataagaaatatcacatttttgttacaaactaagaataattcatctaaaattctcttaaaatatgataattaaaaaaaaaaaagatacctatctagcttcctctcttacttcaatcagatcaagaaattaggttttcttttcacttattttcttattccaaaatgtgcatccagaaaggcctggtgtctgggaggagcaaggctaagccagctacattgtggagcagtctccgcacccacgtgagggctgagcgcttccgaggcaccagggcatgaaacggcagaagggtctacaaataccgtcattagcaagagtcatggaagggatttccctagaataggatttgaataatgataaaatgatccgtggcacttctactttgcaatggcagatgtggcttggtgggggacggtgtcatcactagtcttaaatgaaaaagcttcattatcttacttcatcatgcgccttgcaggtactccactgaaaaaaagacaaaacaggaggcaaaaaattcaagcctcaaggtaagccatttcaatgttaagtatccaccttttttactagcagatcataaaaccagctagttttatgcaatcatttattttattttttggcctcggaaactcaaagctgttaccccaacccccaaaaagccagaggaagataacatatagtaaaacgacagcaaattacacaaatctaaaacacacctacactacgttatagtactatgtcagcagataacgtaaaaatggtctctttatagaatatacggtctttaactgaagaactccaaagatgataaatacttacgtcttgatgttctcatggtacaccttggtgtctgacggctggttatagagtggctataaaataaaccaaacacttataaacaaaatgttgtacgcttgcctactaagagacaaagacacactccctacacatcaatggaagctcaggtaaagtacggctaatgggtctacacacaaacactcagccacaacctccagacttagctggcctctgtgaataactctgtccaccccatctgctaacaatgaaatccactgtaccccatagtcacttcactcatagattttttttttaactctgaaagacaaaggaggattagatgccattattaccctaacaagatgattcaaagagttttccatttctgctattacttcttcctccttctacctcagtgatttaacagctgcttgggcaaaaacatgatcaggaaaatgcctctgcaaaggtcccaagtttgtgtacgttattttaagcttatcacccttactgcccagccacattactttcatcctgaacaagcgaccatactccaccttatcccaagaaaaactgcttcagaaagagcactagacacgaaaaaaattttttactcaccagttcaacttttggaccaagaccttcaaatattttatgagcttcttccgcttttttctacagataaaaatattattatattatataagtaagaattactttacctaaatgcaaaattacttctaattcaataatatttacctaaagaccaatctatagtcaaacttatccttacttccaaatattctttcatatgacaggctaaaatactaattttgtttctataactccttcaccaaatcagtcaaatctgaacatgtgttttgaaagcaaaatccaaagaactgctaagttcttaaaagcaaatagatattactaataagattccaaggagaggaagcagagattcactattagaaatgaatccctcaaacatgtttaaatcttcaactcttaatatctctaaagatgatttaaaaacacaaaataccataaagttggcaatctttaccatggtagaacaaactgatctctttaaagaaaagcttataatgagtatattctctagttttaagaaaatcttggtaataacagagaaaacaactagtttgaattactcaaagtattcattagcaaataaatgttgaattatatacttttacatgccttttggggcttccctgatagctcagttggtaaagaatctccctgtcttgcaggagaccccagttagattcccgggtcaggaagatcccctggagaaggaaatggcaacccattccagtgttcttacctggagaatcccatggacagaggagctttgcaggctacagtccatgaggtctcaagagtcagacacaacttagtgactaaaccaccaccagcacatgtctttttcaaaatttaaatcatctagaccaaagtgctatctaacagaaatctacctttaataggcaaatgaaatacaacaaaattcgacactcaagctgtttaagctggaaccctacatccggtaacagtgtcaaggttctcagctctctctgcccagcacatgctcactggtcacgagggttccctgtccactagactcccactgtccacacactgagactgggaattctccaggacttctgatgtgagacgtcgtgggaatgaaatcaagcaggctccccaagtgtaaagaaagatgttcccttaaaataaacattctccttgtcatttatcagtcaatcggtcaaagatttacttagcatatattatgtgaaaagaagtatgtttaaccagtgtagaaagctcaaactagtgtaatgaactttctgaactccaagaaactcaaaatgttattgagatgagaaataaacctatcaaaaatgtcaaatgcaaaactgtaacaacccatacaatgtgcagcgtgaactctacttctattgacagttttaaggcagacttgtgcccttggtaccattaacattttgggccagatgtctctttcttatggggactgcccagtgcattacaggctactcagcagtaccccagcctcaatccattagatgccaccagcactctacccccctacaagttataacaatcaaaaaagcctgcagttgagaacaactgttctcaaaaagccaaatgtacataccagaaaattcaaatttactaactataaggcgtgtattaaataacacacaaataacataatcacaggtcataaatttggaaatatctagcaccttcaatgataatctctctagataatctagataatctgcacttaccagtttttcaatttgccttctcgaggcactctaccactatacagtctacagcctgttcttcaaccaagaacaagctggccaagtggaactgtaaacaagtaatactggtagacaaggaggaaattatgttatggcaaatatatactagtatccacttacctcttcaggactaattttagagctgatatttagaaagtgtttgcatattccaagatttaagttttgcaaaattttattaaatatttgacttaatgttggtttaactgctaagaacagattaacttgtcaattgtttggcagaaatattttaatttaaaaccttcacatttatataactttgttctaaatctgcagatagaagtaattaatgcctcaaacatacactgaatatgttccatgtgccaagcacctgctagaccctaaggaaacaatgaataagaccgactttctggtgtggaggataaggagtcttggaaggctgacagagaaaatgatccgtgctttgggtcctgaagtgattgcactagacagacaagacaagcaagacacagcgacgcctggcactggggcaacatcacagggtaaaaagcactgtcatcaaggggacactcatacctgttctggtagtgctaagaaaggagtccaggcccgcagcctggccaggcaggcatgtgagccctgatgaaaaggctgggctacttgggagaaaggggggaatcagcaaaaagttctctttggaaatcacactggggatctcaaatatgaaggatggattagaaagtaaagaatgaagcaaggaaactcagcacctatgcgaggtgatgggttaaaataagctagtgccaaaggaggaagagagaagcaactgaccagaccaacactcaggaggcaggactgaggctcctcattgattaaccaaatttgcaaagtagcaaaaagagagaaatagacagtttccaagacaatggcctcggtgaccaggggttattggcactgagtacgttctctattgtcaatctctttcttctagtgaaactagtgctacagtaacttgcaaatcattcaaccaaagcataaatggttttgaaaactacactccacacccctctttcaatatatattataacactgaaattagagcactgacaaatatttttgggatctacaactgggaagggtgacagccaattaaactattaaaaatagttgagaagagtctgtttagagactaaatgaatcttggcctcaagtttaactatgatgcagagcactttttctctcagtaagacagttttaaagctaaccatcagcgtgagcagtttcctgcttcccactaacgtcctaaataaatgaaagaagtcacctctcagatcatggccccagtctctcaagacatgttaggcttaactgcaaccagcatgtgttgctgacaaacaagaaggggatgacccttgtcaccaaccactgctctctgccttctgtgtcaaaatgagtaaggtcattcatgaaaagaagcacagatggggaaaggtccgacaaaaggcagctggtgaggagaaaggttcgggtaagggtcaggagagaggaaggctgcatgctccacttccgcccctgaggacctccaccctgccccttggagacccctgctaccatctaggacctactgcacaagcactaccacagcagacaactagcaacagcggatacaaaaagaatttgttttaaagatgatttctatggttactgagttaaaaacaatcttcaccgtaagtctaatattaacacagatttcaagctaggttcttctcttctacacagaatgtgtaacaagctgagtgtataaatgctgaagtggcaagaagaggtccaaaaggaactatcggctctgctgatgggcatcgaggaacacgtaccacactaactaacaagaaagagcacacatatataaattaaacacaaaccgaattctctgtcacatcctagtcaggcaaccgcagaacccactaacactggaactgtttattaagcctgtaagagaaggctaaataagcaataaatagcactggattcaacatacttgaaaagtaactcatactaagaattcagtgttttataaaaaccttttccatcatcaccagctctgatccttatttactttacccttgagtcacaaactgacctgcagccaatcagcccacagaagtgctttattgttctactgtgttttataaaagcaggagactttctataaaatccattttggggcacatccctaccctccaggcatgccctgagggatcctcatcacttactccacccactgcctttcaccctcacggaggctggtctgtccaataaattggactgattttgaacccagtcaagaaaactggtgattaacccgtatttctgcctcctggtgacaattaccatcatcttaagtattgggtgtctgatgactcagttatccatctatacatacacatccatgcacacctgactccaagatcactcgtgtgaacgcttacttaatgattagctcacagctgcttttctcaaagccatttcctttaggatctgggataatatagctgtaggctgcctgtataagatgcactgattctggtgactccactcacaacagggcaaacaactgaaacaacaatccccaacttctgctgatggttgcctatagctgacaaaccagttctctagcacggtacataaggcatggaattcttccttcaacaggggcttctagaagacccatgataagcagctctgtcacaaggttctcttcacattagggggaagttggtttccctttagctgctagttcctgggctggattctggtcaaaaaccaacttcaacatcacaaaactattcatagaattgagactcagctttcctaaattcgtggacactttttaattataagcataaaagaagaaattgttttaacagacctaaaaaggcaaagtctacctaaaggtcagtggcctcacacttctacaccccaactctcagttctgaagcagataatgcaagtcattcccacatccaacaacacattctctactacaacagtgtacctggcatcaaatgtcccttataaagtgaaaaaccacggaacggctgcattgtgtgctacacacttaacactatataacaggagatttggctgataaaattatactgtcaaaaataagtatttataccatataacatgaatatgaaatattaaataatttaagacacaactatcaacttctcttcagtatgtaaagaaaagcaccaagcttcaaaatttaagaacattaaaaattatagcagaaagcaggctttaatacagttaacattaccacagaacagagacaactggagaaggtacagcccagtggtcttcaagccctgagctgccacggaatggcatgaacttacccggttttcatcataaataatttgaacaacactgcggtgcttctgctccacaggaggcggggacacaggcttctcgggctctggaggcttcgcggcctcctcttcaagctgttgctaagagacccagaaagggagagtcaggcatctgctgcacgtcagccccaccaataattattcaccagagacaacacatgcttctgagcaacgcttcgctgattctacagggtaatcacttaaccgacaagggtctaaggacccaaaggccctaatgaacccaaccagatttattttgactaataactaaacagcataagtcatcttttgatagataaacccttttgtattctaattctgataaatttaaagcaaaataataagggaatctaatagcaaagagagataaggccttcttcaatgaacagtgcaaagaaatagagaacaatagaatgggaaagactagagatctcttcaagaaaattggaaatatcaagggaacatttcatgccagtatgggcatgataaaggacagaaacagtaaggactaacaggcagacgagattaaaaagaagcaggaagagtatatagaactacacaaaaaaggtcttaatgaccaggataaccatgacggtgtggttactcacctagagccagacaacctggagagtgaagtcaagtgagccttaggaagcactacaacaaacaaagctagtggaggtgatggaattccagctgagctatttaaaatcctgaagcatgatgctgttaaagtgctgcattcaatatcccagcaaatttggaaaactcagcagtggccacaggactgggaaaggtcagttttcatttcaatcccaaagaagcgcaatgccaaagaatgttcaaactactggacaactgtgctcgtttcacatgctagtaaggttatgctcaaaatccttcaagctaggcttcagcaggatatgaaatgagaacttccagatgtacaagcttggtttagaaaatgcagagaaaccagagatcaaactgccaacattccctgcatcacagagaaagctaaggaattgcagaaaaacatctacttttgtttcattcactaagctaaagcctttgactgtgtggatcacaacaaactggtaaattctttaagagatgggaataccagaccaccttacctacctcctgagaaacctatatgtgggtcaagaagcaacagttagaaccttacatggaacaagtgactgattcaatattaggaaatgagtatgacaaggttatatactgtcaccttgtttatttagcttatatacaaagtatatcatgtgaaatgttgggctggatgactcacaagctggaatcaagaatgttggaagaaatatcaataacctcacatatgcagataatatgattctaaaggcagaaagtgaagaggaactagagagcctcttgatgaaagtaaaagaggagagtgaaaaagttggcttaaaactcaacattcaaaaaactaagatcatggcatctggtcccatcacttcttggcaaatagatggggaaacagtagaagcagtgacagattttgttttcctgggctccaaaattactgtggacagtgactgctaccatgaaattaaaagacacttgctccctggaaggagacctatgacagaacctagacagcatatttaaaaagcagagacatcactttgctgacaaaggtctgtatagtcaaagctatggtttttccaatagtcattacagatgtgtgagctggaccataaagaagtctgagtgtcgaactgatgcttttgaactgtgatgctggagaagactcctaagtcccttggacagcaaggagatcaaaccagtcaaatccaaaggaaatcaaccctgaatattcattggaagacctgttgctgaaggtgaagctccaatactttggccacctgatgcaaaaagcagactcactggaaaagactctatgctggaaaaaagaaggcaggaggagggagcgggcagaggatgagagggttagatagcatcactgactcaatggacatgaatttaggcaaactcctggagatagtgaaggacaaggaagcctggtgtgctgcagtccatggagttgcaaagagtcagacaaaacttggcacctgaaccacaacttaagtacgagaatctaaatgtatgaaggtattgcatctgcctctatcacaaggaccctctgtgtccctggaataatgctgttctgccttatagacacacaattcctgctaatgtctggcagagacagcatggtagaacactgaagggttaacccttaactcagcacagcaccaccctctaccccactcccccatgagactttatattctacagtgaggaggtggcaaagtcgaaagcacatgaactgctagtatgtgcagccacaacgcaggaggctatctgaactactctgcccaggttcagccctagggtcaccctttacaagtggtttgatccaaagaccctttctggttcttacctcaatctggagcaagtgtacaaacccctcatatgtgaagtggggatattcatcctacctaccacacagctttctgagaggattaaaggactcagtatatgtcaagcagaactataaatggtcagtgagtatcacctactgaagtaagtagagactgaacttggttcactgctttttgtcttccatcaccccaactgatacctagtaaatgctcaacaaacagctacatggatataatataaaaggcattaaggtaaaaggtggtaagtctactaaaggcccagcggaaaaagattacctacatttccaagtaagacagagtcaggttcctcatcatgtaagtcagaccacacccaatgaaaggataaaaatccttcaagagggaagctttgaggtctacttccactttggaacagaaaggactcaaacgatagtattcggggttctgagatcattctcatgttaatgaggtctccaaccctgcccttttattcgtttgctcagaaggccttctttcagaatgtccattaagtaggtatagagaaagaaataaacaggtttcaggaaatcacattttgttcttcagagttaagcagccctgggacaaaaccacagacagacaccagacaagctcatagattcaaacagactggtggttgcaggggcaggcaaagatggaccaaatgggtgaaaggagtcaaaaagtataaacttccaattataaaataaataagggatgcagatataaactatagttgaccatagtttggtgactatacttaacaacagtttattgtatagttgaaagttgctgagagagtagatgttaaaaactctcatcaaaacaaaaaaaaaaaatctgtaaccatatgcagtgagagatggttaactagctttactgtggagatcattttgcaatatatataaatataaaatcaagatgctatataatgttgcgtgctatataattttaccccaatcttcttttaaactgagaactactaggaaaaagagataaatcaaaaatccagctatctactacatttctacatcaataccacaaagaacacaaagcccagaaatcagtccaaacctgatttataatagagctaaaaatgcagctggaaaaggatgaactttttaataaattattaatatgggggaaaaaatattgacttttatcttgaggcagacacaaaaactcaacttctggtggattaagaataatgtgatgagaaactataaaatttcttaaaagatgataaactcttttcatgatcccagggtagtcacatactaaaactacagaaattcttttcaccaaaaatgctgacctaaatgtaagagctaaaactataaaacccagagaagaaaacataggtataaatccttgtttggattaggcaacaaggattatggttcttagataatctgacaccaaaagcacaagtgatgaaagaaaaaataaactggacttcatcacagttaaaactgaaagctttctgccctggtgtgactccatcctgcttactgccctctgcaagtacagtcactcacctctgcccactgtctctcccacctacaggtgtgcccctgggggccttggaaccacctttcagttgtcaactaaagaccaataaagatgactttaaagtggattatgatgaagatgagcagttatcttgagataggtcagttatactcagcttggactctgtctccttttcctctctccagagaggtcagttccaaggctggtgcaaaggatgaagtgcacactgctagagcagaggtggtcccaacgaagcagccctggccatgctaatttgtccctggggggctgaatgccaactctggtccaaaagtggttcagggcttgtagttattagtggacagctcttagaagatgcagaataagaagacaaagaagacgacgtgaaactctggaatacatctgcaagtggtagcaaggttccacagaaaataagcaaaacttgctaatgaaaaggaagctgaagaaaaagctccaggaaagaaatctatacaagacactccagccaaaaaggcgccagatcaaaccagaatggaacagattcaaaaccatcaaacatcaggaacaaaagtcaagaatccttcaaaacatacagtagcctgccagactcctctgtccatgggattttccaggcaacaatactggaataggttgccatttccctgtccaggggaccttcctgacccagggatcaaacccctatctcctgcattgcaggtggattctttaccgcttgagccacctgggaagccctcaaaacacactcactcactcacaaacctcctaaaacaacaaaaggacctagttctggagaagatgttaaagtaaaactgcaggcaagtctaggaaaaagcacgatgaacagtcctcataaattaagacagggagagaggaaaaggagacagagtccaagctgagtatcactagcaattcagaccaagttttctactttaacctcaactccctctcctgatttaccccaccacaacccaccaggctggaagcaatctcactccggcttcataaagcacttgtgtttgatggctacgagtcagtgaatcttatactttgctttctattacttattcatttgatttacctcttttaccatgttttaatcacttttatatctccttagatgctcaataagaattttaacgaatcagaagaaaaaagagtttcttacatcaacaaacactatcaggatagtgaaaagacaacccacagaatgagaaaatatttgcacatcatatatatggatattcagaatatataaagaactcttactcaacaataaaaagacaacgcagcttaaaaaaaatgggcaaaggatctgaataaacagttctctaaagaaaatatacaaatgaccaacgcacacacaaagagatgttcatcgctggtcactaaggaaattaaaattaaaaccacaatgagagactacttcacatgcactaggatagctatttaaaacagtgaagaagagagagggaaaccctccctcagacactgctagtggaatttaaaatggcacatcaactaaagttaaaaatatggaaagttcaacactcttctttaaggagacaaacattccaagaatgtactaagcagtaaaatcagacacttacttgtttttttttcagtttaaggatctgctgctctactttcgcaatttctcgatctacacgatccatactctgtattaactcttcctttgaaagttttgaaggtgaagcattttgatcatccccacacggttgcccagagattggagaggaaggagcttcatgtttgactccaaatgccgggtcctttaaagaagaaaatcaagaacaaatggtttctcacgaaagatcaatgtcagcatcaagtctcttaaccgggacttccctggtggtccagtggctacgactctggttctcaatgcagggggcccgggttcaacctctggttggggaaatagatcccacatgccacaactaaaagatctcacgtgctgcaactaagacccagtgcaggcaaacaaataaaaatattttttaaaaagcatgatgggttcattaaaaaaagattctcttaactgaaaaaaagtgcgttttaaaacttagcaaagccatgtgtgctccctttctacacagtagcctatagtagcaattttctcccttcttcccgcccaccctccctctctctctctcacacacacacacacacacacacacacacacactcacactcacatacacacaccactgatgttcacagttcagacatatcactgaagatcccaaaagctatacaggttgaggtggttaagtggccaaccagcctttactacaatactgagacatacagagaatttctgcaaaaataacgatgcaatcacaacaaaggaagatgccaattcctcagccattttgttgcagtgccactccaaaacatctgaacacacgcactatgtgtgtccacccaacttaacagctacaaatggccattcctatcaaaagttttcaggctttccaagggctaatactgatgtacataagtctggggaatgacctagaacttttgatgctttgatcaccctcaataaggagcaactaagcctgcccgccccacagcacatgtaacatctctccagccaaatgtacctcctcacttcagctccataatgagcaaggactacagtagactgaaggcctccacccaaaacctaccaccctaccaatacacgcacgcacactcgcacagcctactcatctccagtacaaggtgaagatgtgagcaatactgcaaagcatatgaatttcagattaagacactggttctctttaggttgtaagaagtctagaataagcacagttcgtaagaccaaagggccctcaatgtattaaacaatgactaagtaactgagaaatcaatagttctaaccaagaatgcactcaaatatacccagatagttgttccaaaacaccatggaacagagattaactaaaatttaacatgtatattcctgaaaaatctgatattctgtaacataatatagctaaatcaaggcttctggggaaaatgggattatagttattacttaaaacctgtaaactttgcaagcagagcattaacaaaacaacagcaactctaataaaataatactgtcaaagctccaataaccatttgcattcagactacagtcagtcctttgatagctgtaaaccctgcagtttatgcttcctctgttgatcctttgggtcatttgcttccagttcaaaatagcacacttcatcataatgttaataaaaatcagatttgtggtataaagactttgctgttgtttagtcactaagttgtatctgacgttttgcaaccccatggactgtagcccaccaggctcctctgtccatgggattctccaggcaagaatactggagtaggttgccatttccttctccaggagatgttcctgacccagggatcgaactcatgtctcctgaattggcaggcagattaacctttaaaaacataaaaggacaggaaaaaaggtctcacagtttcttttcaacattccaatcttcattagttagtttaacattgaaaagcagagcagttcttgaactaagctagctactacctgcactaaatgaaaaccactgatagatgcagactttcccaatctttttaaggtcttcatctatctagaaggctaattcttaattatgaaagcttgatctctgaaacattcacgtgcaacaatcattcaccatgaatttccatgttacattaacatcattctcttacatatgcatatgagatcatttgtgttacaaacacatataataccaaaacagattacattacgactcagcagattttgaaaatgcttctcaggtgatctgtctgacctgtgccctaagaactactattacagatcaatatttcccactgacttcacctctagttaaatatttaacaaaaaaacaaattcctgtttacagtgcctatcatctgacaggcactaggcagaaaggtaaacaaaacaggcttgccatcaaggagtttataattttgtgctgggacattctgttagctatttgaggggggggggagttaaatttctatcccacatatcacaacaaaagccaaataataatgtttatatgagatttattaacaaatcacaagtagccacaaacaaaaggtattcatattatactgagtacaggaaagtcaacagcaaaagacattaaaaaaacatcgatgaatcaaaataaagaacaattttctctttatcaaaataggaataaatttacaaggcaaatgggaaaaataatttgcaaaacgtgaactctaacaactcaacataaaataaaaaacacatcgacagaaaactaggcaacagatatgaaaagcaattcataaaacaggaaaaaaggaaaaataaatgaaaaaatgttaaattttaataacaagcaaataaatgcaagttaaaaatttatcaaactaacaatgatctttttaaagaatgtaaatatgtgatttcagtatggacacacagctaccgggcgctcttacatcatgctgttagcagcaagaactggttttccaccttttcaggggaaactggatacactcgggaaaaccttgaaatacgctaacaggaatttaccttaaggaagtaaataagaatgtaaaccaaaaaaatgaacctagggaattccctggtggtccagtggtaggcctccacactttctctgctgagggtacaggtttgatttcctggttggggaactaaaataccacaagccgcacacaaaaaacaaatgaacaaacaaaaaaatcaagctaagaaaaatatgtcattattctaatgaataagcaggtaacctacatgtgtgacaagttattttatatccatatatggaatatgactgaaaatacaactgtaaacttaatgacacaaaatgaacctcagaacctatttaagcaaaaataaagtcatacacaatgcacaaagtaagcacaataaaatatgcacaattattaacgacaaactggtgagacaactttttccttcaagcttatccaatttcattcttctataactgaagaaaaaaactaacaaatgctaaccctttcaaaatcccaacttctaaaataaaaggaaagtcatgacttacagcttaggcaggaaagaaacaagactaggaatcagaggtcatgggttttcatttcaactcaggaaacattacctaggtcacttagtttttcttaacatctgtcttctctactataaaatggaaatcagctgtactctcatctaatataaatggattaagttttaagctcgctctctgccaaaaaaaatctatagctataaatacatttgtgttcatttattcagccttgcaagaaaacctttactcacttctttttttccttcttttttaaatgctgcaaacattccttataaacccacagactataatacagatattttacatggtaaagtgggtctcaatattcctaggagtttagttcatttctagctcatcacaaagagctttacccacccaacttactgtttttaaaatttcaaatttacataagagttgagagactagtataatggattcaattacccttcatctagcttcactaattgtaacatattgctgtatttgctttatctctctgtatacatatacctacctttttttcccacttgatctatttgagaataaagtgcaaacatatttattgtcttttatttaaatcactgttcactccataaaaactcaaagaaaacgtgtaggtatttagttatctgatattacggtgcaaagggccactagccctaaaggcaaacaaacttttttggaaagagatttaagaacaaaaaagcaaagataaagagatattaatattgatagtaaaagggttaatactttctgttaaaaaagcattttaaagaattagtttattctttctaaaacaaatatttattctgtacctactaagtgccaggtaattcctgatctgaagatctaatgacaagcaagatagttaaatacgataaactgaggaacaaaataaaagtataatacagaaacatgcacatcaccaaagaaaggcaagtaacaataaacaaagaaggaaaagagatatgatcttaatagaaccttctcataaacccacaacacatagtgtttgaaatatcatgagatcactggaaggactgatgttgaagctgaaactctaatactttggccacctgatgggaagagctgactcactggaaaagaccctgatggtgggaaagattgagggcaggaggagaaggggacgacagaggataagatgactggatggcatcaccgactcaacggacatgggtttgggtggactccgggagttggtgatggacagggaggcctggcgtgctgtggttcatggggtcacaaagagtcggacacgactgagcaactgaactgaacttattgctgttgtttagccactcagtcatgtccacctcttttgcaaccccatgaactatagcccaccaggatcctctgcccacagcatttcctaggcaagaatcctggagtgggttgccatttccttttccaggggatcttttcccaacccagagattgagctggcatctcctgaattagaaggattctttaccactgagctactgtttggaagcccgtcatgaaattatagctcatattaaaagtagttatcactaagagaataaaaatttttctttacaaaaattataagcatagttaaaccttacctaaaacatgtcttctcccatgtagtaagttaataaactgcaactgaatttaaggggattatttaaaattcaatttaataaaactgtgacagtcttgagtagctctgactaaattttacagcccagcaagctggtacaaaatgcttgagagtcattcaatagcaatttttctttacagcagtcctcagattgtttctcatttaccaaaaagtcaaaagtactgactttaaagtctggagtattaagtctgtggctttctagttttgtttaaacaaaatttttactttcccacagcactaacctttggtgaatgcaataactggtctttcttttaggcactgtgcctgaatatggctaaatacacatttcagaccgacaactccacagggtaagagaacaaatatttaccttcttagcatctccagaagatctcaacccttctggcaaagtgtgcactaaaggtaagaccgcagcgctgacccgctggaaatgggaatcagaaagctgctccagacgcggtctcttggagtccagtgaatcatgatcccctggggaagggcctgggtgaaactgctcatatccagttctcctttcttgaggcctatcacacacagagaaaagaatcactcgaaaatgtttaagtaatgtacaacttcctgctaatatccctggttgaactttgaaatgaatgagcagttacacttactttcaaagtgaaaccacccccaccccaggagaacacatacctcactatttagtcctattaaagttctgattctaacagaaaagtttcttcttttctactaggaaaggggaggtaggagtagaggtggtaaagtagtgaaagatgcaatagaagattcaatttgcataaaatttaaaaggtgctaaagaatatccataaaataattatttttaaacccatgccataacaactgaagtaatataatctagactagaaaagccactcttttcaatcaataataaaagcaagcagggaaaaaaaaaaatccttcagcaactgccacatgtaaaaataaatgccttgagttgtgaggtattatcaagacttaaaaacaagtgttttgagagggaatgcaatattgctttgaacacataattctgaccctcaaaacatgctttctgtctaattttccccaagtacctaagtatcttgaaggtcaggaatctggtttcaatttctttacatgatatactgtacagagtatttacaaagtatttccagacgcgacatttacttgtggccaaggtttaaatgaacatctcacaaaacaacttttcattttgaagttaatcatggggttttgtttttagtataggtgataaaacaaaccctgaggttgataatttcataatacttcaaaaatctgaaatcttattcaagacataagatcccattgtctccttaaaattcacaatgatatcataaaaaatactgcaatagaaagtttcaagaataagacaaggatgacagttttagccacttgtattcaatatcgtactgggagttcttatcagaatattaggcaagaaaaagaaagaagcatccaaactgaaaaggaagaagtaaagtatttctattcacaaatgatacgatctcatgtggaaaactctcaagaaaccacaaaaaatgttagagctaataaatgagtagggtgaaattatgagattttaaaaaaaaatcaacatgttaaaatcagctgtatttctatacattgacaatgaacaatccggaaatgaaattaagaaaacaattcccaccccccaaaataattccacttataatagcatccaaaagaataaaacaggaatgaattagaccacggaggcccaagacttacacactgaaaaatcacaaaacattgctgaaagaaattaaggaaaatttaaatagtaagacattccattttcatgcactgaaagacaatattgttaagataacaatactacacaaagctaagtatacattcaacataatctccagcaaaatcccaacagagtttttttgagacattaaaaaaaaaatcacaaaattcatggagatgggaatgccctagtggtccagtcgttgactcattgttttcactgtcgtgggcctgggttggatccctggtcagggaactaagatcccacaagacaggtggcgcagaaaaaaataattcatgtggaatctcaagggattgcaaacagccaaaacaactgtagaaaaaaatatatataaagttggagaactcacactttacaatttcaaaactcactacaaatataaaataagcaagagtatggtacagccagaagggcagacctacagaccaacagaatacaactgctgctgctgctgctaagtcgcttcagtcgtgtccgactctgtgtgacaccacagatggcagcccaccaggctcccccgtccctgggagtctccaggaaagaacactggagggggttgccatttccttctccaatagaatacaactaagagcctagaaataaactctcacatctcagtcagcctcaccaaggctgtcaagaccctcccacaggcaaggacaatctctgcaacaaacagtgctggagaacggaatttacacacacacaacaatcaagttgcactcataatggattataaatccaaaacttaaaaactcctagaaacaaaatatagggaaaatctcctgaccttggacttggtagtgaattcctggatatcacaccaaaggtaaggcaacaaaagaaaaatgtagatgattggacttcatcaaaataaaaaatttttagtacatcaaagaacactatcatgagaatgaaaagacaaaccatagatgggagaagatatttgaaaatcatgcatttggtaaggctgcagtatcctgtctgatgcccacattccttctccccagctctctctctgacacattctctctgcttcagtctacccacctaaaatccaccctccacagagcagccaggggcaatcagataaaggccatgcccctggttgcagcactgagaaccagggctactgttggcctgcttggagattttgtgtggaacttctataagtaaaggcaaccctctggggcccctagctgtgtcccccacaactgggcaccactgttcaggacacaatccacaaaagctaactaacttccaaggatcacattttacctgcagctactctacctgggagactgaccaaagccagagggtgaggtgtacccacagctggaggagaaccccaggaagccagggcacaggacaataagaaaaacagagtgttgaaaactctcactccatcaagaaatcaaactattccccatttcagcttgccaattctttttacaacaaaactactcatgcataaataaatatataatttaccatttaaaatttcagaaaaaattttaaatgaactatgaaaatcttggtgaaaacaaatacaattttatattgggagttaagcatgaaatgcgcatctttaacaaagtatttgccttctaaaaactaatactgtatgatggcgtggccactttgtacacagtctggtagttttccaaatggcaaacaaaaagggccagcacctaatccagcagttccactcctagtatgtgaccaagaaaaggggcatatggaacttcccaggtggcactagtggtaaagaacctgcctgccaccgcaggagatgacggagacaagggtttgatccctgggtggggaaaatcccctatccaccccaggattcttgcctggagaatcccatggacagaggaggctggtgggctacagtccatggggtcacaaagagtcagacacgactgaagcatgcatgtggagtataaaggggtatatagacagccaaagaaaaatctgcgcttggatgttcacagtaatattattcacaacagtcacaaagtgcaaacagctcaaacagctatcaattgatgaagagaaagataaaatgtagtacttccaaaacaaccaaaaaaaaaaaaaccccaccagatttcacactaaaatatctctgcagactcttaaatttaaaatttcctacattttacagacttatcatcatctcatgaacggaggagcctggtaggctgcagtccatggggtcgctaagagtcggacacaactgagtgacttcactttgactttcatgcattggagaaggaaatggcaacccactccagtgttcttgcctggagaatgccagggacgggggagcctggtgggctgccttctatggggtcgcgcagagtcagacacgactgaagcgacttagcagcagcagcagcatctcttagtaccatctttaaatagctttagagcaaatttatcaaatggattttttattgtaataaaccttcacttaggggtaatataaagttcatagctatttaaaatactggcccatgaagatcaatcagaattataatttattgtgtttattcccagctgagggagactcttgtccaaaacaaaattaatttcacttaaattttaatatgtataaatatgagttgacctctctgaatttctgattctctgaatttcagagaatcttttatagtatctgaaactacctcagttgttctgtacctatttaattaaacatccaaatactctaggtgttgtatgttagtcgctcagtcatgtttgactctttgcaaccccacagactgtagcctgccaggcttctctgtccatggaattctccaggcaagaatactggagtggactgccattcccttctgggctaatttttccaatgaaatctagaaaacatgataaatgatattcacacagaaataactctttttgtgagtgctgtgtttataataaacatttgttaacaaaaaaattccaggaatatattaacagagctaagtagcaaattaccccaaatcccaccacatagcaatagctgtaatcaggggtgagtttcattaccagacatcacttatttctacatacggatgtacggacatacaggtaaaaataaaacagaagaatcacatagagtattttttaaatacagaatatttggtttattttatacagatacatatatgagaaaaaaatgaaataaggcttaaaaatggaaggaattactacattccagttaaatattcctttaatgcaagaaatcagttccttaaaaattctttctaaagggtgaaagtgaaaagggtaaggaaaataattatgaaaagcactgagaagaggaatttttttttaacctgttttcctttttcatcaaatcactccaggcatacttttcaaatgcatatctttaaacattctcccaatacttattgcatctctgatttgggggacttacattattttactttgtcaagatttagtactaacatccgctaaggaaccatgattccatgattcctggagatgtctcatatggaccctcacttgaatgggtttatggctactgtaatcctttgaccatggcttccactccttattcagctgggttccatctctgagaaattcttcaagaagctttaaatactcagtgttttcatgtctaaaaatgtctgcctattgcttttaaacatgtctgatataatattttcggatctcaatttcttctcctcagaactttgtagctattgctctgtcagattcttttctcttattaaggacttgttctgcttgctagattcctgattcttttacttatccttcaactttaataataattcaaccaggatctgtctcagtattgatcattctgtgcaaatttttcctggagcaagatatgtcctatcaacctaaagatttcttccctcacattaaaggggaaaaaaggtggtttttgtttttttttaattatgagtatcatttcctttcccttactaggttctccatctaggaaacacatgtgcttatgacatgttggatgattttaatttgccctccgtatttatcagcctctttctaactgctttgatctctctgtccttttcttctgccttcactctgatcatctcaagacctttcttccagaacaaaggtctgactttcagccacatctatcttatcccttgttccttttcactttatatacagaatttaaaatgtggccttgggggcaaaggaatgtccaatctcgctttatctgatacggttggtcttagtttgtttttaaatactttattattaatttattcttaagtgcacagtattcatggggcatgttctttgtttttcatcttctttacacacaagggtctttgtttttggaacagtgcattgcttgagtcttcctttccaggagaatgctttcctggttcacaacatccttcaccctcctgctcaggcagactatgagcagccttacacagactcactctgtggtaaagaatggggtggggtgggggggtgcggtttccttgctcatctccaccttgcctggtatgcatttatctacagatggaggactggatatggctttctatataattctctacagccagaggaaacaagagaaatggggcgagtcaggggaaaactcagctggggctatgatccttagccttggctccaccagtcacccatgtaaccagttctgagggctctggctcagcactttgcaaagtggcacctataactaactatccttaccacaggatggcataatgaggattcctaagtcaaccgatcaccacatcaccacctccactttcattttcccaaatcagggcaatcatgagaaatcctaggactgtactagcctttctttcttcaacactgcttctttgacagtagaagcaggaattaggaggccaagttgtgcaagattcttctcattccttccttgaatgccactcttccaagttgatggcagtggctgtatcctttccttctttatgtgcagggtgcatttttagccctttcttaaaaaaaaactatcttcgtatatttgctagacagcagaggagagtgatcttatttctctccataatcttcaccaagaaatacattttacaatgattttaaacatggctgaataatttcaaactttttatcatcttaaaacctaaacaataaacatactttttaaaataggaaatcaggttctttataaaactgctaaaacaaggattcaagaaaggtgatttactaaaggcagttatatttcaaaatactttagattaagagtgagaatgggaaaaaaaacacagggcggggaagcatggaattgagtaaaggaccacagagacagtaaggacactggagagaatgagtatctgacatgggccaacattagctgacaaaatacccactatcctttgcagacaatgtcttgttatcctcattttcacaggtagaaatttaaggtctgaggcgtctaaatcactgactagcaaccctggctgtgaataagaaagacctgggcctaatcccagggactaatttaattattctgagataagattggacatcaagctcttaaatctccccaggtgctcctaatatgtagggtgaattcagaacaccagcttatacagtgtgaccaaggccccaagagctgaccaggattcaaatctaggtctgtcggactgccctctgcacagcattaactctgaattctggaaacaaggttttaagagtttataaactattattgacaactactccaaaaggtcaacaaatataaaagcactcaaaatacaactgtaaatgaccaatcacagcttggttaataagactattaagactaaatataacactgaattaaaagtaataaaataaatgacacacgtgtggagtttccacacactccccaagttcattcctgtgtgaaaacacggaagagaacctgttacctgtcagaacctgggtgaaactctgaaagtagggaaggcctcctgcgaagctgctgctgctgctgctgctgctgctgctgcaagagctgtgatgcctgactgacttcaagatgagaagaacggtaatcagggaccgcaaactcctggtagtaaaatagtgacatattaattattaaccaacaagcagaaagcatcatgcaaccaaagcaagggcaaatgtacaaaggcagttacggtccaataagcatgggaagaagcagcaatgatgattccagtgcttcactgacctaattctcttcccataacctaaaacaatcaacattaattgtgtatcactcaaaagaattcaaaatgaaatttcgtgttcaacctgtgttttatttattcttctaataacgaatcacagtaactcctaatctgtattatttacttaataggatctcaaacccatgtgtgcaatatgaaatcctaagaagtatccctatcttaaatttaaaatggataagctgaagggtcacagaagccatctagttaaatccatgtatagtcacaagtgaagaaacaggcccagaggatcagcacgctagttaagagtaacagtttccctcattctaggtgggtgtttttatgtttatcttcctattttttgaacagacacacgtaacaggtaaatacaggcaaagatagcactgaggaattttctcagaacacagtagagcacaaagatacaggaattacagaaggaacgttagaaatctcagctacagtaaaaggctctaacattcaatatccatccacaggtgagaggcaatattctaagaaataaaaaagcagcatttctcagaagttagaaaggactcagtcctctcctcaggtttcaaagggcctaagagaaaagttcagcatactttaaacattaaaccatactggacatatcagaattttagaaaatgaacaatagagaaaaccatcagtcataagacagaaaaacttggtttcctacaaagtaagaagaatcgtaataaaaaaagacttctcatcagcaacactgaatagaacgaaacagacaaatacatattccaaattcagaggaaaacaaatctggaaccaaatcaccaagggagttagagaatgatttcctgaaatatgaatttgggttcccctaagtgcttggctgaattccaatctgtaatgcataaggagagcacagtcctgtctttaaaaggctggaccaagaacaacttccgaaaaaagaactattggaatgataaaacaagcaattcccagagctcccatagggccagtgaaagtgaaagtcgctcagtcctgttcgactctttgcaaccccatggactgtagcctgccaggctcctctgtccgtggaattctccaggccagaatactggattgggtagccgttcccttctctaggggttcttcccaacccagggatcgaaccaaggtctcctacattacaggtggattctttaccaactgagccaccagggaagccctacacatggccagagctcatttgaacttcctccagccagagacaagaaacctcactgaatacagaagacatttagtagacaccctagaagaggaaagttcagaagtggaggatagggtttccctggtggctcagtggcaaggaaaccacctgccaatatgtaggagacatgggttcgatccctggtctgggaagatcacacatgccccagagcaactgaagcccatgtaccacaactattgagcctgtgctctagagtctgggaaccacaactactgagacctcgtgccctagagcccatgctccacaactaaagaaactactgcaatgaaaagcctgtgcacaccactagaaagtagcttccacctgccacaactagaggaaagcccatgcagcatcaaggacccagcatagccaaaaataaacagataaaattatttttagtttttttaaaaaaagaaaatacaggggaagggaacatttcccaggctaacactcctaacaggctgaatgctctcctcttaagatagaaaccaggcaagaacgtccactctcaccttctactcaacttggaacaggggtggggagggtaggaggggtggtggggggtaggggtggtggtggggcgggcttctagccaatgcaataagtaagaaggagaacagacacctagtgtgaaaacagaaaagcaaagctgtctttattctcaggttacagtatcatctacacagttaatcctggggcattcataaaagagcaggaagtaacaagtaattttgcaggagagaagattaatatacatagcagcagtgaactgaaaactgaaatttaaaaagcagcaccagttacaacccaacaaaaatactaaatatttaggaataaatgtgacaaaagaggttcatgacctgtacactgaaaactaagtgactggatacatacacaaactgtggtatatccatatccagcaataaaaagaaattaccaagatgtgccagaacacagatatatttcaaaaatatgagacagaaaagaagccactgacaaaagcattcatgtgaaattcaagacaaagggaatctgtcgtgatgggaagcagatgggtatcctgggagctgagatctgtaggaggtgggggagggggcctgagctggacagggaataagggaacttcctggggtggcagaaatgctctctctcttcattttggtggtagtcttataggtgtatgaagctgttaaaatgtacacatacaatgaaacgttattacatataaactaaacccaaagttaatttaaaaacagcagcagcaacaatacgctaggaaatcagtaatcagatgaacagcactgaggcagtaaggacacacaacccaaagccaacacctaatcacggttaagaacctcagcgaagagtagagagtgacttcttcaaccaaaaagggcatctgcaaaaaacatgaaactaatgaccatttcatctcttcccatctctttttttcaaagcttacactcatggccctggccggctccaagctggtaaaacaatcacacaaactcgtcttcctaccatcaaatctcttaagggagaagttctttaacaggtcacaaataataccagtagctacatgaacacacatataggaaatctaagcttgagacctggctctcactcaagacaccaagtcttccacccagcttaatgctcaaccagaacctggcacatacacataggtcttaacttagaaactctaggtcattgacactctatcaacaactcctaccatcagaagcagagacatggccaactcctggaatctggcataaagccacagtaagaagataaatatacttaatccttaacctttgagaatggttcctgccattaaatacacacacacacacacacacatataattgtgtttggtttctgatcaacaaatgtattacataggaaaagtagagagaaacatagaatacatatgcaatttgtgtaatatctgttccttacctgctggtgacgggtgctgggaaaggtatattgaacagagtggggaggataccgactttgttctgtgctgaatgctccttggttgggaggataacctgaacttgacattatcagtaaggatgtcctcaccaggttgtgagatcaagtgcaacaaacaatcatgcttctaggaaatcacctgtacaggatgggaaaaaaacaaacgataagaactaacgcaccaagggtgcttctaataacttataaccatacctgcataaacaaaaccactattatcagtaaagctttctcccgtatattaatacttacgcaatataacagaagttacaacggctttaaaaccagcaatgggtcttttcctctatactgaaaagaaggttctttaacatatcacaaataaaatcagtagctacatgaagggaacacataaaatcttagctcaggagccagcacacagcagcagctcagtaaatacctttctttcaataattatctgaaacacaaatattaaacattacaaaaacaaaaatctatggctgtaaaactgtaaaaagtcaattattaaaaggattcaggaaaagttataaggttaagtgtttgtgcagaga

SEQ ID NO: 239 - DNA, 28160 bp, Hippotragus leucophaeus
  source 1..28160: mol_type = genomic DNA
ctgatacgcagagtgaaaaaatgaacataaagagaaagaagtagtaatcaaatcaaataaccacagtgcaaatgcattcaattttaatctttaatagttaacattattgctttaggacatgctttccctgaaccaggaacagaatgctaattacataaaaatatacacatagaaaaagtagttctccatattcccagggaaaagacagtaacttctaggatactcaagtgttttaattataaagtcttggtcatttcacttattagctctgtaacatacatatttaaattaaacattattagacagccgttacaatgggtgcgtgtcaggtgccgttactgagtaaatggattctcccgtgaggggatgtgtcgtttcccccacccactgacaggcacggttaatgtttgagtatgtgacgcgtcgctgcacacgcataccctcttctccgcccagagcccatctgtgcatgtgggtgagctggtcaggtcactacctctctaacttccacagcaagacgagctgggcttgggcttccggtgcagacggaccgtgtctgtctgaatcaagggatctgacctatcctcggtagcgagcactcttcgaactgcttcctcaaaggctgctgcgacattcgtggcatcttttgcactcgtttcaaagtagggatagtcaccgttgtcccggcaccaggcttgggcttcttctgcagacacttgccgctcgctgatgtcaaccttgttgcccagaatcacaaaaggaaagctttcgggctctttcacatctgcgtaatatatgaattctttcttccagttactcaagttctggaagctctgagaatcatcgacactaaaggtaagcaggcaacagtcagaacctctgtagaacggcgtcctcaggcttctgaagcgctcttgaccggccgtgtcccagatctgcatggtgacaaagtgtccatccacctccaaatctttatttaaaaactccacacctattgtatggaagagctgggcatcaaacttattagtcacatatctgttcatcaaagaactcttcccaacaccaccatctccaaggagaatgactttgaaaagtgatgattttcctgccattattaatctcaagatctctgactgtggaaccctgtaaaacagaagagtaccatgacattcctttagacctgtacctagttccacgtgcctctctgaacatcagtgctaagggaaagaaaacgcagggaatacgtgacagcaagagatgccagctactgagctcggcacctcgcgccaggctccatccgaccatcactcccgacaaccgctgctgagggctcgttcttccccttcctctggtcacccttgactgaggctggcactcaaagccgagtctaacccccaaaccgttctctcagctcacaacaaaccctgccaccatttgttagagaggcaccaggagaccgaagagggcacatttccagagcaactgcaaattgccctctggtggcatggttcactgacggctttcctctcaggccagggggcttctagccaatcctctccgtctctctcccaacactatcaccataggagctggcaagcagggaacaggggacagagttcactgatctggctgtgaacagaccaaagccaaccacctgagtaaaggactctgttctcttcactgaggacacttttttgcattggctaacattaatgtcagcaccaatggaatttttatcataatatagtaacctagcacattctacccacaagattcgtttgggcagctccaacacttctgaacaaatgcgagcctgggctgtttgttacttgtatttagaggggggatgcaatgaaccttaaaccaaaatgtggtatggtgcccacgcttttaaggggaagccctgggaaggaccagaatgccctgggaaggactagactgccccgtgcaccagtgaggagggcaagggtggggtggggtggcagataaagactcagacacctatttacagcctggggggagcattgttcgtatttaaggcttctattttaactcttttttatggaaaatgtcaagcatacacaattttggaataatgagaataatataatgataccgcacagaccctaaacctagtttcaccaattatcaacttatagcaaatcctgtttcctccatagtgtcccattttcccttctcccaaattattctgaatcaaattatagcatgtagtctgtaaatatttcagtataaaatggctttcaagatattaaaatttgtagaagcagacaatctttagtaccgtctaacagtactttctgcaacgaaggagacaccctccatgtggactgtctgatatgacagccactagccacatgtggctattgagcactgaatttgtgcctggtgggagaaacgaaatgaattttaaattttatatagtcttaactaatttgaatagtcacatttaaagagcaaacagctatactggatagcacagccctacagcaaaaatggcaattaattttcccatgaaagtagataatgtgaatccctcaatgggaaggtagttaaggcatgaacaataattgttatattgactaggatgattcactgcagtagggacctccctggcggtccagtggttaagactccatgttttcactgcaaggggcccaggttcgatccctagttggggatctaataagattccacatgctgagccatgtcaaccaaaagaaaaaataaatcactgcagtaaacaaacattatctggcaatctcctggtatacacgagcatgacccagtataacgaacccagtataattgaacattccccataaccagcaagaattcatctcctactatatgctaccacactattcttacaaacatgtggcaacttgcccctcttattggctctctgacattacttactacagtaattactactataatctaaacaatttaaaattggcgcagcaatcagggagcatactagctggagactttccaacctcagcacatggctctgcccactgcccaggctaaattactgtcagaaaggaaactgaaactatctcaaaccctttcatttcctgacatagtaacagtgcactaaatcggttccttgtttaattctttggaatcttgctcacatgactttaacccagacaaaagagcagcaaaaccaaaaatgcacacaactattcttacatagggaaagtgaaagtactagtcactcagtcctgttcaactgtttgcgaccccaaggaccataacccgccaggctcctctgtccacgggattctccaggcaagaatacaggagtgggttgccatttcctcctccaagggatcttcccagcccagagatcaaacccacgtctcctgccactcctgcatttcaggcggattccagacagattctttaccactgagctactggggaagcatctgctaatgccccctccttaacattctttagtggtcttccagactcaggtctaagtccaacttctaaggcaagatacctggtcctgttccccatcctcaccatcagccattcagaaatgcactgtcaagtggaagtgaaattcaaatccacgggctcagcccacatactcacctttaccctggcccacactgctccccctgctggcaaccccacccactactactactactactactactactactactactactactactactactactaagtcgcttcagtcgtgtccgactctgtgggaccccatagatggcagcccaccaggctccgccgtccctgggattctccaggcaagaacactggagtgggttgccatttccttctccaatgcatgaaagtgaaaagtgaaagtgaagtcactcagttgtctccgactcttagcgaccctatggaccgtagcccaccaggctcctctgtccatgggattttccaggcaagagtactggagtggggtgccattgccttctccaactacacctaagtaacttggccctcagaatgctctgtcatccctaacactgtaaacttcccccagcagcccctcatttgaggactgttcctttcccagggttttcaagatacataaacacggacatttcatgttgtgttgtaagggtgtaaaagacgtgctcaattctagtctatcatttaccccaggactctagttacgtctctagttaagtgtctagtttgctagacacaaacttccactgcacagcatcaacttgctagtatctttacatcacattataaagcagactgtgcaatctaacaacctccagccaaacgagaggttacatatctaccgaattaagtcttagaaattccttgagatttataatcataacttttatcaggatactttgatagttcttttcttcttgcataataatgtgggatttgggatatgctagactcacacaccaggaaataggtacatttttttacatttcccatatataatttggggcctcccagatatcctattcccatcacttcatgggaaatagatggggaaacagaggaaacagtgtcagacttttttgggggggctctaaaatcactacagatggtgactgcagccatgaaattaaaagatgcttactccttggaagaaaagttatgaccaacctagatagcatattcaaaagcagagacattactttgccaacaaaggtccgtctagtcaaggctatggtttttcctgtggtcatgtatggatgtgagagttggactgtgaagaaagctgagcaccgaagaattgatgcttttgaactgtggtgttggagaagactcttgagtcccttggactacaaggagatccaaccagtccattctaaaagaaatcagtcctgggtgttctttggaaggaatgatgctaaagctgaaagtccagtactttggccacctcatgtgaagagcttgactcattggaaaagactctgatcctgggagggattgggggcaggaggagaaggggacgacagaggatgaaatggctggatggcatcactgacttgatggacgtgaatttgagtgaactccgggagatggtgatggacagggaggcctggcatgctgtgattcatggggtcagacacaactgagcgactgaactgaactgagatatcctatttgggagtatgttggcatttgctcaaacaactaatatagacatacacaactctctcagtctagctgcagcactgaatatagacacacatatggtaaagataattatacaaactatcttatttcccattgacatctaacaaaagttagcttgatgcaatctatcattaacataacataattagtttatgaacattaaaatttttccctttttctctaaaaacagaaaaatcctttgaaacctctttagtataagctgaatgaataaaggtatcctgctatgttcttttcaagacttaccttaaaatgtaatatgaagccttttatacttcaatttaagattgcccaaaggcaataatttttacccaagctaaaatgactttagcaatcagttaaacactatgaaaaaaaaaaagaaacatacctgtctcttcaccgtgccagactagagtcaagctcaacagggtcttctttccccgctgattccgccaaacctgttcccttggcagggacttcccaggtggctcagacagtaaagcgtctgtctacaatgcgggagacccaggttcgatccctgggttgggaagatccactggagaaggaaatggcaacccactccagtactattgcctggaaaatccaatggacagaggagcctggtaggctacagtccatggggtcgcaaagagtcggacacgactgagcgacctctttcattcattcattcaaacactataaagaaatctaaataagaaaagcataacacacaggccataagtcttaccttaattgttcagttcaaacatcatcattgtctgcaaagaaaaaatttgaaagctcaccttagtaatatacattgtctcttttcataattttaagagtaaacacaataattaaaaagtaaaagaaatgtctgacttatattagtagttagattcttagtttatgactgattcatgttgaggtttgacagaaaacaacaaaattctgtaaagcaattatccttcaattaaaaaataaattaaaaaaaggaaaactgcacctgcaagctgtccatgacctttctcagcctaaaagtagccctaggatcgaatactatactttgtttttttttttaagaagtttttcacatgtccccatccaccctacttttctaagtatcccattcagacaaatataaaatctggttaatatgaaatgtaaaacatttcattcactgttcaaattctgcccaaattttgagtgatttaaaataatcatattccagagaataaaatcgaggcaccaccgactcaatggccatgactttgagccaatctccgggagatagtgaaggacagataaacttggcatgctgcaccccatggggtcgcaaagtcagcagagcaactgaacaataccaacaaggataaaaaaaggaccactcaagggacaagcacctaatgttacacaggaaaatttgggctaaggcagcgcagaatatcgtgaagcttctttctaggtagccagagcagaggggaaactttgtgagttaacaaaaaccactggcagaaaggagaactggctccatgtgccaaaggccaagagcccatacccgtggccaagctcttggacaccctgcagcttcgggactctggcgacagcaggacctaccggagggctgaggaaagattcactgagacatggacaccagggaaagcggctcaccactgtgccaggctcatgacctgagcacagacagcttctgtggaacaaacacatgaagaagccttaaatgatagtttcatggaaaccagacaggtttcttttatggccatttcttcagccagatttctggaagagtcacaggcagaacaaataagagggaaatgcaggccgacattaggaagtcaaaggagcctagtcccacacaccaaattcagtgtggaggtttcctgggccaactaggctgtgctaaagcactagcctctttccatctaaaccaacagtttcaaactcctctccctctcttttttaaaagcaaagggcatttctgcaggacttacatgaagcagccttcaacttataaattcaatcaatgaaaaacacaatacccttcaaaatcttgacatttgggagttaaggacaaaaccaccaccaccctcacaatgactgagcccttcaggccaccaactttgcatctctgcatccactcgccaccagctaccctaggggtgaggactctgactcagagaggtgacattccttgctggtggtcacatagctaggaaagtgtccaccccaggggcctctgaccctgccaagtggctctgaccactgcacagctccatctggaggaggaaggaactgggagggggtatgactggaaccaggaagtgggactgaggtacgaaggcacccacatggccagggagagcccagggtgggcagggcacctggagctagcagtgggggggtgccatgggggcgccatggttggagagagaaaagagctgtgcggccacaggacttcaggggcaggccaccagaagatttctgccaatgcccttggagtgagcctaactgcatccctgagcagatgcggagtccaaaaaagcatctgtctgcgatcacaagagcaggctgtggggagggcagaagggaggcctggggcagagtggtggtggctcacttaccatccctctccaactaccgacggtgtcagcgggctctggggtggctggcctcctactagagactgcagtaagctactcaccccaaacccctcctcctgctcacccctggccaagcggctagacctcagctccctggaagccctgcccccgcgctcctggcagcccctgcaggcacttctgcatgcaaaggcaatactgagatcagtgtgcctcccagggcaacttcacgtttgtaaagaggcaagatctcgaagaagattcagttatgggaaatgtcttataccatgataaaaatgcccagatttttccctgagccgtccattttctaaactctacaccaaaaatacatccccatatcattctaaaactactcgccctcaaaaaaaaagaaagcaaggaggaaaaaaaaattgcaaaaatgttcccagtggggcaaatggaaatgacctaaatgcataattgggaatgctctgcagcccttgagaagactagagacacgggtctgtagaaatgcattaagtaataaatccaaagaacatgtacgccatgatcacaccgtgtaaaaaagttcataagttaacatgaaagtctgcaagaaaatctcgaacaatcaacaccaagtctttaaagtcctgacttgatttcacagtcatactcctttttcaaatatcaaaagtattcttttaaagcaacaacaatcatttattttgctcttgaatctgcaatgggggcaggggttggcaaacagaagcattttttaaaacttcattttcacttaaagcctagcttgactgaatgctgtaattgaaatagaaatatttttcttttaaattttcttcaaaaactgctatccaccagaccttaaggacaactgcttcctgaagttttctataactcagattatattaaaaataattcaacatgaaacccaaaacacaagcaacagaagaaaaaataggtcaaatgaacttcatcagaatctaaaacttctgtgcttcaaagggcactatcaagaaagtgaaagacaatccacaggatgggagaaaatacttgcaaatcattaatctgataaaggacctgtatccaggaactcttaaaataataatttaaaaagcaatttaaaaatggacaaaaatggtcaatatcattagccaggaatgaaatgcaaatgaaaactataacgagataccacttcacacccaaaaggcagacaataacaagtgttgctgaggatgtgagaaaactagacctcatacgctgctggtgggaaggcagaatgagtgaagtcactcagtcgtgtccgactctttgtgatcccatggacggtagcctaccaggctcctcttcccataggattttccaggcaagagtactggagtgggttgccatttccttctccaggagaccttcccaacccaggggtcgaacccaggtctcccacattgtaggcagacgctttaccatctgagccaccagggaagggaaggcagaatggtgcaatgataatgaaaacaatctgtggttccccaaaaaggtaaacgcagagttaccatcagttcagttcagttcagttcagttcagttcagttcagttcagttcagttcagctgttgtgtcgactctgcgaccctatggcctgcagtactcataggtatgtactcaagagaaataaaacaaatccacacaaaaacttgtacatgaatagcatagtattaatcataatagccaaaacatggaaacagcacaatgtgcatcagctgatgaataactaataaaaatgtggcctctccatacaatggaagattaatcagtcacaggaaagaatgaagttctgatacatgcaactacatggatgaacctcaaaaacatgataatttaaggaagccacacacaaaaggccatacattataccatttatatgaaatgttcaaaataggcaaatccacagagacagaaagtaaatttgtgttccaaggaatggggagtgactgctaatgggtacaggtttctttttgtgtgtgtatgtgggggaaggtatatgacaaaaatactccagaattagtggtgatgattgcatgatttagtgtctatactaaaaacaactgaactgtacacattaaaaacgtgagctttactgtatgtgaattataactaaataatctagacatatttttattgacacacacacacacacacacacacacacacacacacacactcggcctgagaattagcaatgagaccctaatttatacatgccacaaatgatctccttgtcccttcagcagtatccttttcaataagccagttacacacacaataaatactctgtcaggattacaagatcatgtgctggcaacaatgcaggttaacgacggtacacactcatctgaacgggaagctggttaagtaggttactggcagcaaagaaaatgaactatgttttcaacagatacctcaaaactaaagagaaaaagagagcattgaatgccagccctttcctttttataacactgttttccaacttttcaatcctgcacttttatcttgcactatcaattgtttacagatagtgtagaggagccttttctctggtctctctctccatgctggcttccaaagctgattattacaataaaccaatggggagtcaaatccaagcatggagaatatatatctccaacagaaatgtttgcatggattaaagctagaccctttttatcggtcatggacctaactgcctccatttgcacacataacaaaacccatttctttctttattacttttattatatgggattttgagcatggcattcaaagagctctccaacctcacatacctatctgcttgtcccaattataaccctacaggtcagcacccccaaacctatcaggcatttactgtcctgcctttgctcaggcccttatctttcactaggagttccctccccacatcttgagagctatgaaaatctgagttatctaaaggcccacttttgccatgtccctcacaacctaatctttctcttcattttcataatcattccacttctattacagctctcattcccttacagtttcctaattacactgtcaaccccctgggagtggcacacaacacctaatgccacgcattcactggccctttttggggtctgcaacatctagcacaaagctttccacatgctgaggcaccaaatgaatgctaaattgagaacaatgagtaaactacttcctccttctttcttgctattctattcttatttttctatttgtactttccgtacttacagttttttgtttctctattcagttcttcccccattctgtttttgaggtctattaaaatatgtgggagaggacaaaaaaaattgattcttacttgaaactcaaatgagaaaaccactttaaaataagtactctggaatgcaacaggaaatgctgaagacccacattcctgttaacaagctgccgaagggatgctaggtttataaacggcttcctcaaattctcaggttttcaaatctgaaaccccttgactaactctcatttccaaaaatttaaactgaatttatcactcctgatttaaatttaggaacagatctttttttttttttccttcttttcaaaatcacatgtttcttttgcactcactcttaaatgtcccagttagaggcacgccactttatttcatatcacagcttgagaaactgaggctcaaagaaactaaccaaggccacgaaagcatggttaatccctccatcgtttctattttcacctaggctgtatttatttccgtatctcttaatacaggtgtgtctcgcttaacagcctcttaactccactcttttatttccagtcttcctgggtgtcttgctgaacaaggcatgtcaaggaagtcattaagtataataatgggcactatctctacagcaagaagtggagcataacaaaacgaattaagcaaatagcataggcacagaccaacttgggaggcacaacttgccacgtgaaaacacgttatctaggtggccactgagcactgcctcagagacagctagagaaggaaaaactgcacaaatcaaagcacgctctatcaccaagtcagagcagctcatcctacttaaagaagttgttctgtgagtgctcttttatgaagagcaggcatctaactgaactgttaagaaatataaactctcagttttgcttaaaacaaggcacctttgtagttagatatactaactaatcactaacagtggtggagtgaatgggtagggagaagagaggagaaaaaaatagatttggttaaggaactcaattttcttaaattatcctgaaaatagagagcagtgtgctccaacacaactttctgtgatgaaggaaatgttcttatgtccaatatagtagtcacaaatcacatgcagctactgagcacttgaaatgtggctggtccaactgaggaagtgaagtgttaatctcatttcaattcggttacatttaagttgctacatgagtactgcattggaaagtacaggcatggagtgtgcttaactgagagtgcatgaaagagctgcagggggaaaatgcaccttctagaatcataggtgagacaagggtgagtgaatggatggaactgtgcttgagccttcctctggaaagagtgaaaaaggtttcatcagattcttaatggagtatgcacctcaagaaatgatcaattaaaaatatttttttaaaaaaagcaacgatcaatacgcatctgcaacatctgtacatttcatgtgattaatgtgtttagttcataagaccctcaagatttttacctttacttgccattactgtttcgaggttctatcccttacccataagacttcattaatattacacttggaccatgaactgtgacagttcaatcaagagacttagtcacaggaaactgctaatcctgtgaggagaacattttgttcttcgttttatttaatgaagtcctcaaaaggaacaagcataaatttacctgtaatgaagacacctgaaaatggcacttgaaatgcttgacagaaaagagtggggatagttttaaggctgcactttgggggacaaaattaaaatgcaaaaaaatgaataaaagtcataaaataggaatactacactaggaagcagagcagggtatttcaggaagaagactgtgttgtgaaagaaatgaatgtgaacgtgcaagttagaaaaatacattaagagcaacaaaacacaaactgaacacgatctgcgatgatctgctgtaacttaagggaaccctggttctgactcgtctcttcaagttaggaaagaaacctgcttgctatctttaatttgaagcagaaaggggtgagggctggagaaacttccatgtaagctcagggaagagtcagtatagcaacactccccacaaggcatgaggccacagcaaggcagaacttcttggctgttacagaaattaagtaagaggggtggaatttcccaagaagatctatttcaagagaacagctgtatatccggcatataggactgaactagattagagactcccattctgctgggaaaccgtcaccaggtcaaaacgagaagaaacgtcagagcgctgcagggagctttctggaaagttcgcttcatcacacgtctccatcgctgatgctgcagtttgtccccaccaaggtggggagctgacttggcttacaaaagccttcccgagcccagacttactccgtcatcatgacacatttcgctctgtgcctgatcaactctgcacctgctcactgaatggaggttctcaacccctctatccccagagcgtcagcagaagtcagaggagacttcccaaaggccaatccaagggcttctcctcagtgctcatctaaaccccctaaggcgcacgcagccctaaagcgaatgaagaaaaaagtgccccctgaggactttgctgtgtacacttctacaaacacatcctcatggctgaccagtgtcttcagcagaggcccacccaatggacagtgaattctaagatggagcaatttgtctgaatgtattacctggcatcaaatctcaaaggggtacccttctgagggtatttttttaaaaacaagtaagataatggaggcccaaatgggaaagggtcttgcaagtatcacacctctaactagaggcatcagtgggaccttgaagtcttagccaggactcagtcaccagtactgtctctgttaggtctaacggcctggcaatgaccttgaaaatgcttcctacttcatcatccataaagctatcctgcttctctgcccctcaccccattagctttctgcaacccaaatagctcccttttctaggaggctcttagaccatatatatcatcaggttgatgcccttgctgttgttcagtcactaagtcatgtcagactctgcgacccaaggactgcagcctgccaggcttccctgtccttccctctctcccagagtttgctcactcatgtccactgtgtcaataatgcctttacctcttcccaaaccatatcttcctgggatataaaaacctagtgattcctaaagtccacctccacccttctgccccttgggcgccagataagaattccaaccccttttataatacagtcatctgatgtattcagatggcagttcaaattcaacagatctaaaaaccaagttaattattttccccattttcaaaatctcttgtcttacccacttcacccacacaagaaacgtgtccagttcactccctacctactgccactatctttgctcaaataacaaatgctatgactacaataacatcagccaccactgttccctgagtgtctactaggtacctggcacagagcaccttgaagtcacctgcaacgcagatgctaccacccgtgctttatgggtcaataaaccaagttcataaagattgaataacttccccctggtataattgaacagggcaggtcaaacatgtgtgaccttcactcccatcaaaagaaaagaagtcaaaaaaatatacaaagccaaaaaagacaagagaacaactgtaggtgagagacagcaacaaaaccaggaagatgggaagtaaatggtccagcagtgacaagctgaagagccagggaacctacctggggagaaacagctgttaaggagaaattggccccgagggcacggggcacttctcagcacagaggcagacaggccggctgggtggaaagcacaaggggagaccccatgacaccccctcggaacccaggggcctctccctaccagcagacctacttcctaataaactgtttgcagccggagttggggatggaactctccagatgatgagggaggggacagcaagcgacagtgcgtgcagggaactgggcagggcaggttatatgacatttcagaaggcatcacagaggtgctggcaggacgcttcacaaccagtgctcaaaagggagttcatgagttcatggtagatcacaccacattcctttctatgacatcgtatctttgggaggcggggttccctggggctagtatgataaaaatcaggtgctgcacaaatattaatgcgaaacagggtatgagggtagcagctgtttgttcccaaacattctgcaatgttactgaagagtactggagctcgttctagaaatgctttgtattcaccaacgcatggccttccagcagctcttctgttctgactccaatgaaaccagatgtatgttcaggtgtgtccacctagtccctgctctgattacacaccccagcgcaagactgcgcccacgagagcagtcgcctagccgcatgccgcagtccagggagttctgatatgtgcgaacctgttaaagcagttaaatcctccattatctgtgatatgcttctacagagcaagtgccaggaagagaaatctgtaaggcgctttttcagacttctccaacactgacaaacacagcccctctcacaagagcgaaccttctggaaatgaccttagcctctgttccctcaaaaccgagcccagttcacaagaacctgggataaaaacggttcagcccacactgacccagcagtcagttcactggctgccgtgatctgctctccttcactcctggataatgaatgtagccacaggatgaatgtagcaatctgttccatactgtttctccatccccctctaacaatagcagacattgggaaggcatcaggccatggacacaagtggggcctgtgttctgagtccctgcactgaaacgagcaggttgagggcagccggtctggtgaacccccacggcctgcctcgctccgttctgtatttcttcccagacacggggctggctctccccggcccacgctgatctagctgcgacctcacctgcagtcgctcactgctcgtcatcctctctatgtttgtgataagcaccagcatgccctactctgcacccggcatggtcaaaaattaacagaaggtaatggaggaaccgaggatgagcaaacacccggagctcaccttcacaacacgtgcaatgccaagagtcacgctggggaagttctctccagagcagaggcacccccagactccctggcaagctccagcctcccctccccaacccacggcaaccaggcccccctcacctacacacctgggttccccagctctcctccctcgggaactttgacctttcatctgcatcacagctctccaaacgccctgaggccttttgtgagttcaccaccctgctcaaaaaaaaattcttaatacatgttctgttgatgatctacttagtcacaggctctattttcttttccttggttttgattaacaaatttattaccgagctacctttcaagtgagacctgtttctcacacacacagacacacacacacttttccatttggcttatttccttctgttgcttcaccagcttgcctgaggcagaactccaggcagccctccttttactgcgcttcacagttattaggggctttttacaaactgaaagtttctggcaaactctgcatgaagcaagtttatgagcgccattttccaacagtatttgctcactgcttgtctctgcgtcacgttttcataattcttgcattattttaaacttgttcattattattatatttgtaaccatgatctgtgatcagtgatatcagcagtgcaaaaagattacaactcactgaaggctcagacaatggccaacaattttcagccacgaattattttttaattaaagtgtgtatgttttttttaggcgtaacacacaggtatggtataaacatcttgtaactttcgtaaacagtggtaaaccaaaacctttggtctgaaaccaaatccaaaatatctccgaggtatatctgtacttggaagccaataagttgatgtctttacttggtgtcatagatccacacaggcattacaaaatacaaccagctcaattttacaaagaaagaaatgtggtgacctaacttggccagagcagcaaaccagtgcacatggagcaagactccccagagcagggggtgctcctcctgcaccagtttctcttgatactccccaggataaaacccctccagtagtaacagagcacacatccctttggtagactgaacttgatagcaatcatttttaggtgtataatacagcatcccctctaccccacagcagacagctcctgatacaaggcagagaaatctattcattggcaatgaacacactcagtgtccatcagcataaggcaaaaagcaaagctcctcacaaaagatgccatgttgcccgaatgaataacactctcacagcaattcctaaatagagccaatcttttttttttttttttttctggccacgctgcagagctttcaggatctcagtttccccaaccagcaactgaacccaggccacggcagtgaaggccccaagtcctaatcactacaccaccagggaacttccagggccaagcctttgggactcctctcactcacaaagttcacctaggagttacatctgccaccagaatgaagcagtacatggactgaaggggctagttttaggcatgacaaaaacatgccggaaaaagtcaggaaaaaaatgcaaaaatcaattaaaatttttcattgcttatttcttgaattaattgatataatccatgcagaactattgtccactgaagctaatttaaggaagaattttatgctcaacaagaatggcttctcaatttgtttcttgtaaatattcacaagtgttcaatttacaaagctatcaaaaccacatcaaccagagcttgggattaacatatacacactgctatatataaaagagatcatcaacaaggtccaactgagtagcacagaggattctactcaatattctgtaataacttatatgggaaatgaatgtgaaaaagaatcaatatgtatatatgtataactgagtccctatgctacacactggaaactaacacaacattgtaaaccaactatgtggtagctgctcagtcgtgtctgactctttgcgaccccgtggactgtagcctgccaggctcctctgtccatggaattctccaggcaagaataccggagtgagttgccatgacctcctccaataaaattggaaacaaaaagaaaaatgcatcaacctttccccatttcacctaagtccacacacagtaaataccatgaaacaggtacctatgagctggtttgcaaatgttttgtttaacaacacctggcccacgactttgtgggaggacaaagttagatcctgatctcatgactgtgatcagactgtatgctttgggaagggggggactccccactgcccttggtatcactagcacctttttgtcagcaaccaaagactactcagaaaatgtttgctgacaattcgaataatactgaaaccaaatttcctaagtcagcttcaagggccctgaatgcccctcaagttctttccaacacttttgccaacgaaatagaaacggggagcggggagagatttctgttatcagaacatttttggtcactcttattctttcaaataaatgaatatatctcttagtcaagggaaatctcttcaagttcccaagtccaagaggttcctaaacaagaaccaacagcactgactgtgagctctggagttacattgactgacatcaagcgggatttctcaaccccagcacaagcaacattctgggctgggcaactctctgtgaggagctgtgctgtgcattgtaggatgttgagcagcacccctggtctttactcaatagatgcctgcagcactctctcacatgtgtgaaccaaaaaggctgcagaggttgtcaaatgccaacccctactggcactctaaattcacaggggcctactcggaatcctggctcttatcttcagtcctccagagaaccacaggctagatggaagaagtggtggaggaagaaagaaatggaaagaggagagcttggacaagagcaaacagcactgaagtatttccttagtctccaagaactcggccaggcgtcaaggccaacagtattctacttagttttcctcggtctattcaaaccttacaaatgacaacccaaaaatctctccaactcacaaaactctccaaagtaaataagtcagcaagccagaagctttttagtataaactagaggaatttactattaatacaatatccacacacaaaaaaacctgaagagaccagacggccacaccagatgcagagtttgagacaagtagtgaaggtaacttcaatccaaggttctaaaacagaaacgaaaaacagtctccttaaaggtccgtggcgtaagagtactgagcttccttcatgagttttgttccactgaaaagtttctgagattacaggcaatttagggattatccactacaattatgatagcagagaaagacaagcacgaaaaataatttttcattaattttttaaaaagcaaccaaaatctatttttatgaggccaccaaaatcctacataaagagcgtgttcacgtgacgatttggaaactacccgaagtcattcctcaaaagaaccctggtcacgggatgtatcatcacttgaaaaaaaaaaaacacccaaaacccaactgatactcttcgacttaaattaattcaatcggcacttaaaattttcatcttctctctttaagaaacgaagttggaagaacgagaagaacaccattcggaaaccttggccagagtctgcatccgataacggcccaaaccgcctccagcccctaggattagttttatatttcccccctcgtctccaaagtggtactaacacctcagcaaacgttcacctgggaagcaggtcagaagtcgccagtatcaaatcgtgcgcgcctctgccttctgtgagtcacatcagagtgggttgcttcggggtgcctgggtgggtttctccgtgtacgcgtgtttccctgcgggtaacatatgcccttctctccccctaggggtttgtgtggctgtgtccctctccctgatcccagctgctaatggatctctttccccgtgtgcgtctccaggacttctaggtgtctgtcttggggcgtgtatctctctccccgggtgtgtaggtgtgggaccccgtctttccacctgcgtcagacactgtaggaggcaaggggctacaagtcgtcccttctgctgcgggggggagagcggaaaagtgacccgcaatggccgcgcgcgccccccgccccagtgcccgaagcccaggccgcactcgccgtcggcgggctccgctcagaccctgacgccggcgcagctggccccaacccccgcccggccccgaggggagtcggcgccccgctcacctcacggccacacggaataagttcgggagctccgggccggtccgtccgagggcaggggaaaaaaagtgaagagggtcgaggcgccagcgggcaggagacttcggtggcacggcgagggtcagtctgcggttgcacccgtcctgcacggagggaacaacatggcgacgggccggggcggggcccggggaaagcgggcgggacctactcggcggggcggggcccggggtggccggagccctgggaaggtggggaggggcctggtcggcaggagccctgggaagtcggggcggggcctgattaggggctcggggcgcggggcctcgaggtcgcctccgccctgccctcacccactccttgccaatcccctctagctgaatcacaggcttcttcgggtgcgctatttctctagacctccggttgcgttcccgggaaaagacagcacggatactagttacctttaaaagctgacgtaaagtgggaataagcagaccgcaaaagcactgtcacacgatgctgtgactacgcggtgaaatgaatatgcaaataaacaagtgaacagattgaaaaatgaaaacatctgtgacattgtgaaataacaggatttcttgattagctttttttaatttccttgctcttgttaaaatttttactgcctctcgcctctaaatataaagcactagtaggaaaagatataaagaagcagtgagaaaaggcggttctgaaactcttaattcctcacttgaaatacggagttaagtgcaggttgatattgtagaccagagagggatttttagtccctctataaatatattttgtagggcagatttagtttctttattttccaagaaaagatctcacctttattgtttcctgggcccacaatcattaatctctggctctttcagttcagttaagttcaatcactcagtcgtgtccgactctttgtgaccccatgaatagcagcatgccaggcctccatgtccatcaccaactcctggagtttactcaaactcatgtccattgagtcggtgatgccatccagccatctcatcctctgtaatccccttctcctcctgcccccaatctctcccagcatcagagtcttttccaatgagtcaactcttcacatcaggtggccgaagttttggagtttcaacttcagcctcagtccttccaaagaacacccagggctgatctcctttaaaatggactggttggatccccttgcaatccaagggactctcaagagtcttctccaacaccacagttcaaaagcatcaattcttcggcactcagctttcttcacagtccaactctcacatctttccatccactggaaaaaccagagccttgactagacggacctttgttgtcaaagtaatgtctctgcttttgaatatgttatctaggttggtcataacttttcttccaaggagtaagcgtcttttaatttcgtggctgcaatcatcatctgcagtgattttggagccccccaaaataaagtctgacactgtttccccatctatttgccatgaagtgatgggaccggatgccatgatcttcattttctgaatgttgagctttaagccaactttttcactctcctctttcactttcatcaagaggctcttttgttcctcttcactttctggctctttaggaagtcaattttgggtaaggaagctaatgtaattattcagtactagaatagttccatttgagagagtttgtcacaagcataaaaggcaattttagaatccttgtgaaagtgaggcatgtgactgaattctagtttaagcttaaatgaatttttctttcatagaaaacaatcatatccatgcagggtatttccccaagcaaatataagtaaaggtttataaaatgcaaatctactgataatagggaggatgaagagattcattagcttattttaaaacacataattaaaactacacaacaaaacatgtaagaactttaatctttcaaaaatacaccaaaatagatagtgttagatccagtggactaaattgcaacaaggaagccatgggtcactaaggaaatgctatctgaaacattctagatctatctcataatcatagacaaggagtgatgcagtaagggtttatcgtcgtaatcgctaataccaaccagctattaacaggtgcacttatgaaattactgtatcttgacttaaagaaagccttgagaaatctaagaattttcaagaaagggtcctaagaaggtcctacaagtgattcataggctgtttcaaaatgtgagtgagccatataaacatatctagttgtagccacagtcagcagcagaagaaagaacacggtggtggtgctttagtcgctcagtcgtgtctgactcttgcgaccgcatggattgtagcccaccaggctcctctgttcatgggattccctaagcaagagtactggagtggcctgccatttccttctccagaggatcttcctgacccaggaatcaaacccaggtctcctgcattgcaggcagattctttaccaactaagctatgagggaaagaaagaaagaatatggaaagaaagaaagaatatggaaaggtacttttactgaaataactcttacttggtcgctagccaactgacacttaagaatacttgtatattctggtctcttccaccatccacttctttacctaattgatatgacaatgcgagagtaggctgagtggaaagatccttccctgaagggcaagtttggggatttttcctgtggattgtatagttggcaagctgacacaagttagataaatatggtctctattgctcttgcttcatgaacttgtttattaatgaaaaactttgaagaactgaccgagtttggctcccttcatctaattagggtttttgcctttatattctgtaaacatctagtgcatcactcaagacggaaaaagaggtcaagattgctgggcattaatcatgcctttccttaagtaacacctacttattactatgagtgctgggagttaatactccatttaaagctggagtctaaaagagatcacctctggtatctctgatgaaaagctgctgctgctgctgctgctaagtcgcttcagtcatgtctgactctgtgggaccacatagacggcagcccaccaggctcctctgtccctgggattctccaggcaagaacactggagtgggttgccattgccttctccaggtgaaaagctacaagtaagtaaatattataatatttattataatcaataaatattttatttattataatcaataagaaatagcgaccataattaaattgattgtggacttccctggaggtccagtggttaagaccctgtgctgccactgcaaggggtgtgtgggctggatccctggtcagggaacaaagatcctacaagcctcaaggcagagcaaaaacaataaaattgattatacttttcacagataaggaaaaacacagaactcaatggtaggcaatttgaccattaaaagacaaatctgaataatcagaccctggtggctcagtggtagagaatctgtctgcccatgcaggagatgcacgaggcctgggctccatccctggctggggaagatcccctggagaaagaaatgacatcccacttcaggattcttgcctgggaaatcccatgaacagaggagcctggcgggctacagtccatggggtcgcaaaagcgttggacacaacttagtgactcaacaagaaaaataatcagaaatgtggcccctcaagtactgagactacagcgggtagataagacactggaggaattcaggggtgtccccagacactctcccacatttttgcttctatcctccagctgtgtttatattatatcatatgaccctaccttgctgaatgaaatagattcagtctgtttcctaagagagctcagaagagtagaggagatattcagtaagtaagtacatggatgtacagttataaattggatgaagggccttgagggaaataaacaaggtgcagctggtgggaatacagggtgatgggaccagagaaggtgtgagtgaggaggtgattcatactgagccccaaagatggcagtgggcagggctggtgcaagttgaggggacggcagttcactaagaacctagcacattgctgcagccaataaaattataaataaagatgcaaactattacaaaatcttcagaattgatggaaaagctgaaattatatttgtttctctagtcataactagatctaatgtgctatcttaaaaataacaagtaggtgttgaatagggctgctctttctttaccacactgtaaacatggcataacccaggtaattacagaaggcagaataaaacaggcattaaccttcaggaatgaggtggggaatttgatccctttgctgatttcctgatgaatgtgagtcataaactgaacttcacctttaagggcagcagaaggaaaatcccaggcataccatggtatgtaaaaatatgtttgtgtgtgtttgtgtgggtctttgtacatatgagtgtttatttaaaaaaagaagaagaatggaaaggaagtaggaaaatcaaaacagttgaattgttatgggaatagaattttgggtaatttttactgaaattttgaatcccacattataatatgcttttgagcaataggtagaaataggtgaaaataggttgcaaagagtcagacatcactgagtgactgaagaacaaccggtggaaatcttttactgaagcaatactaggcaacctttagaaatctttgccttaggctacactggtaagagccagaccaaaatccagttatcttagcaactcattccttcagatagaagtccttccaaatccacagacacatctaaaactttgagctgctcctagaattcaggacagtaacatgaaagtgtggtcctcctacgtccccactgccgtacgtctgaacaccccatgcacatcagcagctttcttgacctttttggtacaagagctgagaccactgtcatgcttacataagcaatttctttcctctcatgtcactgtcatccacataggcatatcctctcatgtcatccacatgaacccaagctggttcaggcggctggccatagctgtagttagactcagcctaaactcaatccctgactggattaaagtgataaatccctcagcctatctgcctactggaggacagagggaactctcagtggtggaagatattaactagagcacttatttttcatttatgcataatgcccagcacacaacaaaaaaatagtagccatgccaagaagcagcaaagagtgactcataatcaagagaaaccaaaacaacaggggcttccatagtggtccagtggttaagaggctgccctgcaatgcaggggacactggttcgatccctggtccaggaagatcacacatggcatggagcaactaagctcacgccacaactactgaaactggcaagccctagagcctgtgctccgcaacatgggaagccaccgcaatgagaagccctcacactgctactagagaatagcctctgctcaccacaactggagaaagcccaagtgcagtaacaaagacccagcacagcgaaaaataactaaataaataaagttaaaacagcagcaacaacaatagaattgaatatgtcatgacaatttaaatgtatctcaggaatgtatgctcagggaagcctggcatgctgcagtccatggggtcacagagttggacacgactgagcaactgaactgaactgaacaggaatgcaagtgtggtttaacattaacagtgtgaaagaaggagaaaacatacaatcaattcaatagatgaagaaaataatacattcaattaacagacatttgtgataatctcagcaaaccagaaataaaaggcaagtttcttaacctcatgaagaatatctattgaaaacctatactgaatatcattcattcttaatagttaaaatctgtaagtatgtgctttaaagcaggaaaatggtaagtatgtctctttaatattgcactggaggtcctagcccacagtagtaaaagaaaaagcaagtatgatgactgcaaagggagaaaaaaaacagtattaaacacagatgatatgctgacaaaatccaaaggagactatagaaaatttaccaaagagtttaacaagttgtcttactgtagactgaaagtttgtatcccctcaaaatgcatatgttgaaatcctagcagccaatgtgatactctggccaatcacatactctctttgaaggtccgagtctccggcaagcaacacagagatgctgaacagttccgagttcattctggaatggaagttgtggcccctggtatccagtgaccacagataatgccagtggtgatgataccagtggcaggatctagtacgtcacaaagacagcatctgaattaagtcattcacaatctggattcctgtttttcttgtgcatgtgtgtgcaaccctatggactgtagtccaccaggctcctctgtccatgggattctccagacaagagtactggagtggcttgccatttcctcctccaggggatcttcctgacccggggatctaacctgcatctcctgtgtctcctgcattggcaggaggattctttatcaccgcgccatctgggaaggccccagcgtccaaactccatgctccatccttgcctctaagagctactcagtatctccccaagaaattccttttctaagttgatatctttatttgcaactaggaactctgaatggtacagagttagaatgtatcttatagattttcttgtgccagcttactatgattcatcatataaatgcagctaaatggaattatacctttcttgatatttttggattggcctcgcttaggcttagccatggcagtagtagaaaaagatgacccctccccaaatctccatggcttaccaaaatgaagatgtattcctcaccttcacatccattatgggtcagctggggctccaccccatgtcatcctgctggacccaaactgatgaacctgagctagtagagcagcctctgtctgatatattgcaggtctcagtggttgaaagaaaaaagaccaaactaatatccctgctagctcttagagctcccagccggaagtgacattcattgtttccacccatgtgcgatgcacattccttccaaagggaggggcactgcacgtcacgtggcgaatctgatctgagtggtgtggtgttctacaactggctcactgggagggtcaccaaatatttgaacagtaacacaatctaacagaactcttaccactcagggctttgttttattaaattgataagttttacagtgcataatagcaatgaaataaatttattttgaagaagttctttttctggaggttggctttgaaacctaaacaatagtaacatttgatctagtttattaaagttggatgcgggcttccaaagtgagaggtgga

SEQ ID NO: 240 - DNA, 118547 bp, Hippotragus leucophaeus
  source 1..118547: mol_type = genomic DNA
agagttactgatggcgaagggacaggaggagggaggcagcagagctgaagggctgtcagcaacaggagatggaaggcaagctgcaactttgtgcctgatactgacagcacaggttccggttcctcactggattcaattgttcacatctttgaaagttcacatcttgaaggtctgtatgtaggggccttactgtactttggaaatagaaacatctggtacagctttttcaatggcaggatcgacataagatttgatcgacagacacaagattttcaatcttgtacaataataatgcatgttctagtgagtacaatgttgccagtggcttaggaatcccctgcacaaatactcaactgtgctatccacaaaaagatatgtattatcttcttcactaactgtggctgtaaacagaacctgggagagtcctacaatcagatctgtaggagacaaagacaaagaagccggacgcgtacagggtgcccaccaaggttgtggggtcctcacttttcttccctgtttgaggtatccatgctctcattcattttctgcttttgcattcgtgttcgagtagatgctaaaaaaaaggatgaagaaatgttaacagcactgatggtgtggggtaagttggtaaagggctacccaatttgttatgctcacaccaaactgatggagcccaggacctcacaagctgtggtttccaattttttaaatcatacctctatcagccagctttcccccaaaatatgtaccattaaagtatgtatgtatttttgtgtatgtgtataaattatacaacacatataccccaaacattaaaactcaatgagataaagataaataagcattctaatcttgtcttatgtacccccacaaggtgatcttacacacactcaagtgtgcccaactttgtagaccactactctagaggtgatgtggttaagtctggcatctgagcaaaacagaatcctgggctggtccagaatctgctggagtgagtgttattcttcatgaagttcagaattcccttgtgtttggagatgcactgcaagtactgcaaatacatcagctcacagctgattcattatttttttaaactaattgggctgcactgggtcttattgctgcgaggctttctgcagtgagcgggggctgctctagctgctctcactgcggtggcccccgtgtggcagtgcacaggctcgaggtgcctgggctgcaagttgcggtgctcggtctctagagcacgggctcagcagttgcggggcgcaggcttccttgctcctcagcatgtgggatcttctcagaccagggatcacacctccgtcccctgcattggcaggcagactcttaacggccagaccaccagggaagtccagcttacagctcatttaatttggacgtggacattttaaaatacattattaattacaacatagacaaaaacagaaagcttcttttaaataatttcaaagttcttaacttgattttagaggcgggcaagagttctttataaagaagcacagagaacattcacacttggtaaagggcagaaggagcggctctcagtctccccttgtggcccctctgctctgagcaatccagcactgtgtgatggtctgtttctgagggaagttgaggagcaacctggagaattccctacccttatggcttaagactcctgccacttctcccattttctagctgtacgaaggccctgaacttcagcctggcagagggaattcagtcattgctaagtgtgtccgtgtgaaacggactgactacagcaactgagctcctctgtaagaaaatacacatatttttacatctttctactccttttaaaatgcatacttgtgggctccaaaaggcttccacatatttttaaggcctgattttggttataagcttcatgtctattttcatgcactggggaggaaaagctacaaaaaacagtagtatattaattgatgtaaaatccaaaaagagattcatttataagcaaagaacttaaacctgttacatttagtttcaatagtatcttcaaataatatacatagaaaaatggtttaaaatcaaaagtaattttaaaaactttgtatctcaaagttagtatatacagagatgtactgagagaaagcttctttttaaaaagtcacattttaattggtattgttcttatcaatatgtcctatgacctagggatgacagttttaattcttatctcttaaatatttgtcttctttccaagacctggctctgtttcctgttaatggatctggcaccagattatcaggaagtgtccccttttcctggtgacatttcatggctacctacttctctaagacagtccaataacagtctgtgctttcctggtggctcagtgttcaagaacccatctgccagtgcaggaaacctgggttcgatcccttggttgggaagattccctggaagaggaaatggcaacccactccagtattcctgcctggagaattccgtggacagaggagcctggtaggctcaaagagtcagatatgacttggcaactaaacaactacaatttatgcatactgatatttttcccttttttttttttttaatgtggaccagttttagaagtctgtattgaatttgttattgtttctgttttatgttttggttttttggctgtgaggcatgtgggatcttagctcccacaccccctgcactggaaggtgccatctcagtcacgggaccaccagagcagtcccctgatctttttcttaacatcctttccatctaactctacttgggttaatccgtcacaatctcagattagtttaggagagaatttcatttgccttaacattccaatagaaacagtgacagactttattttggggggctccaaaatcactgcagatggtggctgcagccatgaaattaaaagatgcttactccttggaagaaaagttatgaccaacctagacagcatattaaaaagcagagacattactttgccaacaaaggtccatctagtcaaagctatggtttttccagtggtcatgtgtggatgtgacagttggactataaagaaagctgagcactgaagaattgatgcttttgaactgtggtgttggagaagactcttgagagtcccttggattgcaaggagatccaaccagtccatcctaaaggaaatcagtcctgaatattcactggaaggacagatgctgaagctgaaactgcagtactttggccacctgatgtgaagacatggaaaagaccctgatgctgggaaagactgaaggtgggaggagaaggggacgacaaaggatgagatggttggatggcatcaccaacttgatggacatgagtttgagcaagctttgggagttggtgatggacagggaagcctggcgtgctgcagtccacggagtcacacaagagtcagacacgactgagtgacggaactgaactaacatctaacttggaaaatgatttagtattctttatcaaaattctgatttctagtaatggaaaacttttgtttgaaatccagttctaaaacttgcacattaggaaagttcggtaataacagaataaaagattattctttaagtaagggtgatgatatttatatatgctaagtttctaacatcctccctatatccagcactcagagagttcctcattatagttctgctatcctaaaatattttctagccacagccatccgtaatgaagatgtggtttcacttcttggtcttcctgctgcacagtagatgttgggatgcatgaagatgacctgtactttgcatcatacatttaatccacagatacttgtaaataacatattgactgaattatattttaaatgcataaaagtctgttaattaaagggattctataaatttatccttttataatgaaaaggctttctgcaatgtaaacaattgttcatttacttacttaaataagtacttactcatttctgccagtttctgttgaaatttggattcccctgggagatgtttactgcagatttaaaaattcaaaatatttcatatgcatgtgtataaatgaaaacctgaaatttccaaaaactatggcattttcaatgactatttatgctctttagtaaatagcttttattgtcaaaggattataaatcaaacatctaaaatacaaatgtcataaatttatgagcctagatattttatcagtggttcttataaaacagggtagcgtttttcaagagcattttaaaatctaatgttaatcaaaactaacaaaattctatccatggcattgtaaagcctgattagatttgtaaacatctgatatttttaatgaatttcagtagatttacgtggtgctttttaaactttgggatgcagtcacatcttttattttgagcaagcctcatagtttccaaattattactggcatgagagagactggcagatgccaggaccagagcggccactctgggtttctcccgacgaccagctcagctcctgacacaggtgctaacactgtccctaccttccatctgcttcatcggatccttcgatgtcaaagcgcagttttttcagtggtttaggggggttgcttccttcagcacttcttttgagcgcacggtcgctgttacacaccatttgatttattttctggaacttctctgaagtctacaaattatggaattctttattttagatcattttgtagttagcaaccccatattgtaggttcgaggtgggtcaaaaatcaggcagaggtaatatctgcatttaacttcctgcttctttggaccaaacgggagatatgaaaaatgttaaaatcagactaactacacccaacttccctggtggctcagatagtaaaccctctgcctacaatgcgggagacctgggttcaatccctgggttgggaagatctcctggagaaggaaatggcaacccactccagtattcctgcctggaaaatcccatggacggaggagcctggtgggctacagtccaaggggttgcgaagagtcggacatgactgagtgacttcacttcactttacttcacatctaactctgccccaataaatacctgctcttctcacaccctcctatgtcttcccaacaactctgactactactccaaaagtcctggctcctcattttcagaatttactcaagcacaaaaccagggctatttctcagaagcatgcaaagctggaagagctttctggaaccttgttttctgttttgtttttttttaaagcacagcataactggagcaaatgttacaggaattcaataagaggtatctagtgaagaataattttggactcactttataaatatcatgctgataagtcatacagcttataaatttgaaatcatcattgatttgtagtatttgttgatattcctaactcttaaaggtttaaaataaaatattaagtatctgaaaaactcaaagtatttgagtccttccaagtactattagagataatttgatttatatatctcctgaggaagaatcctttcacagttaagaaaactttgggaaaaaatgctaaagagggcacaatacctcattttatccaaaggacaaacacatggaaacctgtgtcttatctatttaagaaccagagtgaggtgattatctccgtgatgtgtattaacatgttttttttggattctagaatgaaatcagactttccaatagaagttaaatctgatttgactgatttgacactgaggattagctttgctaattatgcaaagctaactttcattagctaatttaccaaaaattaaatgaactaagtttccaaaaattaaatgcaaaaccagattttgatggaaaatatatttagagcacatgtataatatgatagaaatgaaattctgtacacctgttaaatggatttccagttatgagctttaaaatatggaagtacgtataaccttctttcaactctttcagagtttatcgcaagcaaaacggtttgaagaccactactctatatctgacttccctggtggctcagatggtaaagcatctgcctacaatgcgggagacccgggttcgatccctgggtcacgaagatcccctggagaaggaatcccactccagtactcttgcctggaaaatcccatggacggaggagtgtagtaggctacagtccatggggtctcaaagagctggacgcgactgagcaactttactttctttctttcactctatacttaatctggatccaatcctatttatgttgtccacatcacctttgtgaagcctgacagctgtagcctgtgttgagctaaatgtcatcgcatttactatttgtaacaaacgtgttaacatttggtcttttagtatacaacatgtatctctctctagttatttcattggaggagcagtgcttaggcagaggctaaaatggctctcgctaattgtctccttgaatgtggggctgaacctagtgttgtcctgcttctgataaaataaggcagcaaaagtgatggcaagtcacttccattatgacaagaagactgacttcaattttgcttcttatctccctcttcccctccctcctctctgttgtgagtagccagccacccgagggagaagcccgggtgtcaaggaagtgattatggcttgagccaacagccatcgaggatcggccaacagccatacaagtgagtctgagtgaggaaggtggtcctccgggtgaacctggagataactgcagatccagctgaaatgctgactgcagcctcgtacagacagaccctggacccggctaagccaggcctgctcaatgacccacaaggaatgagatttccaaaggtttaaatgcctaagtctgggggtggtttgttatgtagcaataaataacaaatataggtgggggtggtgggatgaaacattcagtaatgctcactgaatataggactgtggattagtgatggtaaggaaaggccagctagagtagtgggctcccagactagaataaccatttcaaagcttaactttcccctggattcctctgcaaagaagaccaccacatagcttgtcacttacactggggcatgtaaccaattcctaattaatttaccagggaagaatatcctagaagttggagaggaaggaaaggcaaaagtgtgtatatgtatagaaggagacaagtgggcacggtggctacattttggagtattttaaatcatactcccaattagtgaaattcaaagctgttttttaaaacattcctttgagactatataatgcacatacatatttgtatatatatacattaatgtatacacacatataatctcaaaggtgtttagaaagcagttttgaaatataccaattaaaattaaacctgatttgaaaataaatctgatatatatcttctaaattttacgcaacatgcttgaatgaggtacttgaatagtagcatttataaattcaattacagagaatttcaaattcttttataattatggtatcatgctatagtaattcacagaaaaaatacttaccccaaatgattcaccgattgatactaagattctgtcaagttaatataaaatacaaattagtaatgcaaatcatatccaactatgcagagatgaacatacacgcgtcattctgaactcacaggaagaccagatcacaggtttcttctacccctagaaccactgatgaattatacttattaaaggctaattttggtagtgctagtctagtcacacactaagctcattccttagatttttaaagcaagaactgcatgtctacaagaatatattttgccattgctcacaaggaaagagggtgaagaaaattttaagtttactcatacttaattcttcataaatcaatgagtaaggaaacaattcaaaattatttcacattttctcattaaaaattcaagttctatttggtaaaactgtataaatgataatctgaattctatttaggatctatactgatagatggtaaagcttatttaacatctgggcttcccaggtgtctctatgacaaagaatccatctgccaatgcaggagacgcgggttcgatccctcatcccagggatcttctggagaaggaaacggcaatccactataggatacttgtctgggaaatcccatggacagaggagcctggtgagctatagtccatggcatcacaaaacagtcggacatgacttagcaactaaaacatttaacacatatcctagaatcagaaatctcttaatttgtccctgtttgaatcatataatttatgcatttgataataaggctgaggaacattagcctgatatgacaaagatttgatcatatgtacatggaatcaatagatatatggattttattgtcctccaattctttgataagtagccatcattctatatgatttaccaaaatatggtgaatacagagagtgttaagatgctctcttaatagctgatcaggattttcagaatgtgacttttttgctaaaggactccaacccagaagtgaattaactaatatcagcaagtagctatcattatcagcataatatgggttaattatcatcattaaaaatttacctaagtatacattttcctgtagcaatgtataaattagacatgctatgcacctcagcagcttagaatgtaaattgtagatatcagtacatagatacgcaaccataaaaacactaaatatatggaaaataacacagggcacatgagagcacttatatcatttgccagttattttctactttttcttttactgaaaatttttatgagtgtgcattgcttatgtaagcaaacacactacactaatgttttcataggattaatatagcccttcttcttgtttatttttcttgcccattaagtgcaactatatgggctaacaatttctgagatgagactacattaactttactaattaatctgcctccactattcaaataaagtcagtttcaaatagcccatgatagcatataataagtcagctgaagtacttcaaagccagagagcccccagtgttgaatgcggaagataacataatgatttgtaggtgcacagagcctttcatctaagaatttaaaacagcttcacactcatcatttacctgagccacagcagccttctgaagcagagacctgcccaaggtaatacaaggaggccgcaggcagaagtagggatggacttctaaagacttcatttaccatcatctacatttaatcagtcatctacattttcataagcaagatgaacagatccacagaaagagttcacaggacattcaataaattctagaataaaaactcttagcaaaaggaatctactttgtttagcagggtggtgacttaaaaaactctgagagtgatctgaaacttaggctcaaactagtactcagattgtttacaaaagacccaagaagccaggaaagttgatgactaaatttgcaaacccgtctaagtaaacagattatctcgcccccaacatccccgatttttatttttatcacagcacttaatataaattaggaaattagggactagctaaataaagaaagctttatggttttatgcttggattaaaaaagaaaaaaaaaaaaaaccctctcattctttactgctttcctaaaaagaaaacacaaaccttgatcttggagtcatttttgttggtgtaggcagaccttctgaaattttatatgggttctttaggggtgatatatagatgttccccccaggaatccgtaaaggtgaactagaaaacttgtaagggcttcgaggaatgtgaggaatcggtgacaaggtagggggctacagcaaaaacaaaagcaggaggttacttaacactttagtgagatccactgctttataagcagatttgcccaaataaaggatgccttcaacataccctggtggaagcatactgcagaatatttgttttcagtctctgcatgaagactgaattatagaatacgataatggaatcatactcctcttctctgatcaaaacacgtttgaatgtctgaggaagaagagcaaaaatacttgttaaatgaatttgggaatttatctctttagagtttctattttaatagttcatgatactttttaacagtaaaaagacgcattattttataggaaaaaacaatctaaagaagccattttaggcttggattatagctgttctactggaagtaaaaagtcatacatatatactgtatgtgttttatgtatatatatatatatatatatatatgtttattacaaatattctgcttattggcataacacagtgttccctatttattttataatatgaatttgaatattaaagtgttagctccccaattggagaaggaagtatcaacccactccagtgttcttgcctggagaatcccagggatgggggagcctggtgggctgccgtctatggggtcgcacagagtcggacacaactgaagtgacttagcagcagcagcagcagcagcagcttcccaattacattttaactacaaataattaactaataatatgaaaataaaaagtggatatgtaaatttatacaaatcagtcagaacatatggtacaattaatgactaaagttatccatatttttgaaaatccttatcatggaaaactacctacctcctgaacagcatgaggaagatctttgtacgctgtgacaatgattttgaatttaagatctatattcttcactttgcatatgccatacatggaacacatcataatctagtaaataaatttgatacaaaagcagtcagggttttgttacatggttgtgctcagagaatgagacggctggatggcatcaccaactcaatggatatgacgagtctgagtgaactctgggagttgctgatggacagggaggcctggcgtgctgcagtccatggggtggcaaagagttggatacgactgagcgactgaactgaactgtggtctaaaacacactgttatctttctttcagttaaaaaaaaaaaaaaaaaaaaggaaatttaatctcccacagaattatcttttcctgtcctgagctcatttggcactgttttagatcaactattcttacgtctcatgctttttccacactaaatgaattctagtttacaacaacacagaaaatgcctatgataaagtttcttcagtggtttctgcaacaagagctttcatgtcatgaaataagtaaatactgaaatattctcaaactctaaagctctcatttgtaaaaaaaatacagcaaaaatataaagggtagccagcaagcaaatatatgttaactaaattgttgcagcttctcgtttgaatccaaacttttcttaagaaatcagtacatagctaacaagtaagcagaagagaagagaagtgcataatttccttacctggtccaaatgcctgtctctcatgagttcatactcattttgcagtgtgtgctggaaaagggtccagatgatatgctctagttctgggtggtcagacagaaggcgtgcacacagggtgttcagtcgaagatatgctagtcgatacactggaaaaataaggggaattaatcatatttactcttaattttgcataacaggtagatattttcaaaatattaaactgttataatgaaatgctgttaaatagcatttaacattaacttcatttctcccactattttccttatgatttctagtcttaggactgttctacatacatagaaggcaaaacaatactttgctgaaaatactactcagcaaaaataatccttttgctgaattattatagcataaagttgaggcagaagtgaaaatcagaggaagaaagatcctaagatattgtgaaattagacaacccaaatactgtttgtttcagtttcattggtaatcactcatcacagatgttgaatattttatcaatattcaagagagtaattatttttaaaataacagaatttctgaactcccttaattttttcgatcctgaaaacaaaaaacaaatggtgtatttctctataaaaatgctagacttgtagattacctaagtggtaatatgactgtgatattaaatatattgagcaagtttatttaaaaatactactggaacatgggttggagaaaagtaatccacaaaactgaattttcctccatctggtttaaatgcacctgtcaaagacttgcataaagtaatcagaattttttagttaataatttatcccactggtcttcaactttggcttacatcagacttgcactgaggacttgttaaaacaaggattttttcctcatcctactagtctctgattgagtagttctagcattaggggctcaaacaaaaattctcctttctgcaacttattgagtaaggtggattctgctggttggggaccacactttggaaccactgctttaattcaaggacttataacatgcctataaagctcagtatatttgctttattcaagtcagaaataagatttatcacagaggaatctggccttctacctttcttcaaagagtttcaagtgggtgtgcacttgcatgtacatgcacagacacccaaatgacctccccaccccatcacacacacacaatcagaaaatgctgtacaacctggtcaccaggaaatgcatctgcattaggccacagcccattgtataatctcaacatacacatctcaacagaggaagtaatgttaggggcaaatatttctgagcataaatttgaaagcataacagtaagcagcaacaataacaacatctgacactttttgagtgctagacactcttggaagcatttcatgtattcattcacttaattatctcaaaacccaaataaggtaggttattattatttccattttatggatgaggaaactgaggcatagagcttttaaagtgacttgcccaaagtcatacctagtaagccgaagagcaaagatttgaatccagtcagcctcgtttcagagtccacgatcttcaaagtaatcatttactaaccttttttgtagaagagtgaaagggaggtagatttcaatggcttctgagtctggaaggctgaggttgcttgtgcctctgaatttggaatagaatttgcacgtggagttgacccttttttctttggggatcttacaggagaaagatacctagatatattcaaaggaaaagtcttcatgtgaagttttctcagaatctctctttcacagatacacaaacacacacagctgtacacatgcacccaaacacatcttgtctatttaatccactgttttacaccaaagtcctatttaaatacaagttggaaaagagagctcatgaggaaaactaggcttgctgttatcatttctaaccctattttaataaatggcctttcctagaaattactgccttattgaaaaaatagctatatatctttatatgtttgattttaataattaaagtgagattgagataataaaaatgactccagcttaaaagaacaagccattgatattaaaatatcaatttctctgattcttctcttaaaaatgtttcactgataactacggttcatttacataagattaagttacacacacatacatcttcctaaattatacagtacagaattatatgaattaatatttcaggtagcattctcaaggcaggtctacacccatatactaaacatgtaaggcacacatcgagacagaagtattagtgcacatgaactccagtttctgacctatcaccgctcggtgctgccctttatttcagagggtagtccaggcctaccttctaattctgttttagcatcagatggtaaaagaatccacccgcaatgtgggagacctgggttcgacccctgggttgggaagatccccgggaggagggcatggcaacccagtattcttgcctggagaaccccatggacagaggagtctggcaggctacagtccatggggtcgcaaagagtcagacatgactgagtgactcagtacagctgagaaataattctgagcagaaagtaggatttgtaccttactatggatgtttctactacatgtaatatattaactagaataccagaaaaagagaaccagtatcatgattttgtaagtacccgggtctagtctatcaccctcgaatttcccttcaattcactagcaatactgtagactgacttaacttgggtagaagttagtctccttcaaattccaggtgaataataggtatcctgctggataacaggtaataattataatctaagcaggataatacttacttcgcttcctgaatctcagacttaagaaggccaaagtggagctcttcatttctccgtttttctaatctcaagaaatggctccgtattacaaccagtttcttaagtcagaaacttaggagatatttaaaattttttctttttcccaatcttcaaacccaatggaaaagaaagttctccctctagaaacatacccctgatattttccatttctttgtatctctactgacatatcttagaccaactcatttatttacatctctcatttggactattgaaattgtctccaaactgggtctttctactttcttccttgccctgttcttttctctcctcctacgccgtctgtacttcaaatggcagccagaaagtggccctttaaaaatacaaattatagcaagctgcccctctgcttacaaccttaatgttttcccacagccttttaaaatctgaactcctctctgtgagtctcctatctgatgagactctacaagacggagccacagtctgcctttccagcctcttcttataccccgctctcctcttgtttgctttaggatttctttctgctcctaagaccaggtacgtttgatcacccagggacactgcacccactgtttgctctgcctggaatgcacaccacacagactgtggcaggccagcatccatttgttcttcaagtctcaggtcaagtatcatttcaatagagaaagcttccctgaacattctatcactttctcagctcctctctttcacttcattctgtttatttccattacagaacttattatactctaagatcaccttatatattacgtgatcaccttatgtatttccttgttcactgtttatttcctttcttcagcatgtaagttctgtgaagggaaggacctaatctatcttacttgcctctgtattcccagtgcctaaaacgcttcctggcacccaacagtcaactgcttattgaattaaagaaaaagataaggcttgacatatttatattaacgtattacctagcaagctaagttatacatgaaggcagaggttccacacactagaaatactctggatacaaatgagcatggaaatggcacctctggaaaacagcccctgcactcgtcacagagctttgtaatgtcaattcttacacagaactaaacagaaacataacattacacacattcctgtgaaaggcaatgtagctggaatgtttcagagcatgggctttggggtcagactgcttggatctgatttctgttggcttttggtaagttaccttatttctctaattcctttttcatagataatgaaggctgctacagtgtctattatcttacaggactgtttggtaattctccagcactgagtgataaataaaggttagtgattgcgttcttcttctaacacgtcatcaggcactcatcaaccattttagtctcctgttcgcactgggtactccctatgcccatcctatggtggttttagtcgctcaggcatgtccgactctttgtgaccccgtggactgtagcccggcagtctcctctgtccatggggtttcccaggcacgaatactggagtgggctgccagttccttctgcggggatctccccagcccatcctatgctgcactacgaaggcactgagctgcacttctggaagaatgtttcctgctttcctggctgttctactttgaggttcatgctctttctgtttccccagtcttctccctcctctctggtttccatattgaaatcctagtctacctttgaggactatctaaatcgtcatccctgcatgaaaactgtcctcctgacactaaagtggagtgatttcagtagcactctgtaccgctccatatgacctttatttgggtcatgtatcttatattcctgattcttgaaagcaggaacaatgtcttatgcaaaattctattccctgcagcttctgcataacagcttgtatcacactatgctcagaatccttctgtgagctggatggacaacagatttcactcacatatctgctgcagtgtgattattctggagaggaaggttgagagtacaggcaggttcaaagtgatcaactggtccttctcggtcctttgcttgtttaataagatcaaataaaggtgaatcctacatgaaacaagatgacattagaacaacaccggtaagcgtgaccttcttatgtatgtatcaaaatcatattgtttgacatagtgagcattattaatatagtcgtaattgacaatggcaattctgaagtcagaataaggttcttgtttccattttgaaaatgattgccaatttctgtactatgcacaaaataaagaattaggactatgtataacttcaaatgcttaaagaaattaaaagttagagaaagagatacagaaaagacccaaagaaagtagaaggaagaaaaatagagatatgagcaggagttaatgaaactgaaaacaaagataaaatacatggtctgataaacaaagctagtaactgcttctttgaaagacctaataaaattaaacaaacctccagtcagactgagaaaggaagagacagataaataatattaggaacaaaaatggggccaccattacaaagatcagaaagataataggggacagttataaataattttatgtcaataaactggaaaatgtagaccacgtagaaaattccacaaaaataaaaattaataaaactcaataagaaataaacctcaatagttctatcaagtattaaagaatttgaaacagtaattaaaagtctccccacaaagaaaacattcaagtacctctggttttaccagtaaattctaccaaacattcaaggaatagataattcaacttttacttcaactcttctgagaatggaaaaagaaagaacattctctctctgatttttgaggctagtacaacactgatactaaaaactgtcaaggacattacaaaaagaaaaattatagcccattctcacttataaacagagacataacaattctaaaattagcaatccaaatcagcagtgttaaaaaacagagtatgtcatttaccgagatgagtttatccaggttgcaagattagttcaatgttagaaaatctataatgcaattcaccttactaattaatctaaggggaaaaatactgtcaaaatcaatgcagaaaaagccctcatttaaaaacccatttattatgttaaaaaagaagaaaagtcttaataaatcaggaacagaagggtactcctaatttgataaatggcatctacaaataaacaaaaaacccacagcaaacatcatgtgtaatggtgaaacattaaaagcattccccttaaaaaatcggagataagagaaggatgtcccattatcacgctttctattcagtattatacttgaggttccagtcagttcaaatgacaaagaaaagaaattaaagatcaaaagaccaggaaggaaaaaagaataaaaacaccattatttgcaaatgatttatgtcaataaggtggctcagtggtaaagaatccgcctgccactgtggatacgggttcaatccctgggccaggaagatcccctggaggaggagatggcaacccactccagtattcttgcctggagaatcccatggacagaggagcctggcaggctacagtccatggggtcaggaaagaggaggatacaaccaagaaaactcaaaaggatctacagagaaattattagaatgagagagattagcaaggtctcagtactgttgtaaaaccaatacaaaatatatttctatatatcaagcaagtttaaaacacataatttaaaaatcatttataaaaatgtaagaccagaagtaagagccattaaaataattgattcaaaaactgtaactttctggaggtgacaccttgcaagaccataaaacctgggaacatacgtatttcactcttttagtacttgaactaagaaagaaaggaaaacagacaaattgccaagatgctaggtttatataaaaaggaaaagtggtgcatctgtaaataaaaatacaaaacactgtagaatgtagattttgtgaaaatatgaagatgtctattcaataaaatgtgtttgaaaaattagctaacaatttgaaaaaaaaaggctattacacattcacaatatataaaaattcaattacattaaaaaacaaaactgaagaagtattagaaatacaaaagaatatctttataacttcttttttaaaatcttttttcacttttactgaagtataattgacaaacaccatatatatttaaggtatactatgtgatggtttcatagaaacacacactgtgaaataatcaccacaatcaaactggttagcattcattacctcacagagttaccttctgttctctttgcatcccttcctcaccttctttataaattcttgataaggaagggcctttctaggtttgaccaaaacccagaagtcgtaaagaaaaacacaaaacaaccggactacataaagcttgaaaacctctgtgtgactaaaacagcaataaactaagttaaacaaaatctttaaaaagtaaacaatgctgatttattctacaaccaccataatgcactgtactaattcctactgtcaagtcattctttcctatattcgtcaggggcactctgaagtgccatctcaataatggctttcagctgagtaaagtaaggctaacaatgaaaaccagctaatgcatgtatgtcacagtcagtgttttatgttttctagtcattgatgaactgagtatcttttcatatgggatgaatctacatatactcagcaggagtggccttatcccattcttttctcaaacaaagacctttcagaagacctcgagactcacagagatatgcaggtaaacttgagcctttaataggacctaagtatgtggctgacgggcattttactttctcttcaaatatggtttaaacccatagatggtttacctggttgaattatcacaataggattataccaaagtgaattcttctaagaatgcaggtgccattctactcaccaacagtcttcatgtttcacccaagtatcacttttataactccatctctcccaacccaactgatacagtggtgtatagatatagagaatgaagtatgccatgagaataataataagcatggcgcaatgcacaaaaacacagactctggagtcacaccacaggtgttcaagtcttgaccacgtactggctgcctgatcttggagagagtcgctttaccttgttatgattctcttttctgtactgtaaagtggagatactaagacaataatgtccagttatcatgcatccatccacccactgttttccatatgtctactctgtatcagatggtatattaggaagtaggaacataacagtaagcaatcctccagttgtcagctactgatagggtcacttcagaagcatctgtcctctttcgccttcctcaacatgttcatctgaaataaactttaattatcttcttccacaaaaaccttccattcctatccagttttccccatatcattatcacttatatacagctgtccaaagcaaaaagaaatcacctacattattctttctctcactctccactggaatccaatccacgaaagttatattggctcaaacttcaaaatatatcccaagtctaacttctccaggtgggacttttagagagttcttaaaattccagtgacaagcatatggtggacactcaataaatatttctagaatgttatatgacaaaaccctatcatgggtttaattaaatacagcaaagcacaaagacgaaagtggatgataggacttgctttctaattgataagtaaatatcaacggtagcagctggcttccaagataacccgattaattcctcctactgggtatttacacccttgtacacttgtacactgtacctgggttagtctgtgtggtccatggcatacagcagaagtgatggcatgccaagtctgagattaccttataaaaaaactgcagtttctatcttaggttctccctcacagatctctgtgtgctctaggggaaagcagctgccgtggaccaagcaaccctatagggaagtctacaggccaacaaatgaagcctctagccaacaacaaataaaggaatgagggctactaacaaccacgtgagtgaacttgggggtggattctccaactccaagaaagaccaaaaccgacgacagccttggttgataacttgaacagctctcctgaaagaactggagccaaaactacacagctaaaccactcccagattcctgactttcagaaattacatgcaaagtgaatcattagttcttttattaaactgttaagctgtggggtaatttcttacacagcaatggataactaatacagaatctgacttttttaatctaaagaaaatatttaatggaacatttaagttttgaaaatttatgtatttgtatctatagcactgcttgcattcaggactcaaagtttactctcgggtttcaggcaagctgttttatgtcattgctaacctacttaaattaactcttagcacaatcactctctggacatttcactccattttgccacttaatcatgtgaaggaaaccagattctccctgtcagcaagattagtataaatcccacttaataagtaatatggatagaaaaagtagaagttgtaagtctattctacctgatctttcatattaacatacatctaaagcaagagtgaacgtccccagagagtaaaggacttcaaggctatcaggtcaaggtattcctaaaagagattctgattatccataagtacaaggtctccagtgctagtagaaaagttaacaataggggaagcggaagacaggaattgctattgttttctgggcattttaagaaatattattagccctgcattacaggaaatatttttgtactgtcctaagccaaatcattataaggccattttaccttgcaaaaggaaattagaatacaaaacacaaaattgtgggcaggccttaaccagacagttctttcccatttaacttcactacttctttaacaccgatatttttcaggattctttcgctaatatatatgctggctgagccatgatcatgactttagttctatctcggcttactcctaaatctattaatacatttctgactaaaactactctttcaaattccagatccagtgcttccaactaaacacctcagatctctgcatatatatgtggcaagtatctcaaatgctaacatgttcagatattaacatgaacatattaccttcaccaccaatcagccaagacttcttcaatatcctctttggttaactgttagcaatcacctaattgcccacagaacaagtcttagaattaccctgcacttatccttttgattcatgctgttaattttaacatatttacactttcatatttaaaactggtttcttgtagacagcaaagagctggattttgttttttatccattctgagaatctctgccttttaattggagtttggactatttacatttaatgtagtcattgacatggttagtttaaattctatatcctttgtcccatctgttctttattgccttttgacaaatgtgcaaaagcaaatcaatggaaaaaggatgagccttgacctaaatctcaaatttgtaaaaatagactggaaatggatgacctgaatattaaatgtgaagctataacacttttaaaacataggggaaaaccttggcgatctagagttcttaagacttgacaacaaaagcaggatccacaaaatacagaactgataaacagcactgtcatcaaaatttaaaattttttgccttgagaaagaccacgtgaagagaagagtctacagaaactttgagaaattgtttataagccacatatccaacaaaagactagaatctagattatataaagaactctcaatggtaaaacaaacaaacaaacaaactcacaaacaattcaattagaaaatgggcaaagacctgaagagatacttcaccagagacaaaacacagatcacaagtaaacagaaaaagatattcaacactattagccatcatcctgatgggcaatgtaaattataacgtcaatgagctatccttacgtgatcaaaatggctaaaagaaaactgagacaataccaaaaaatggcaaggatgcaaagaaaatggatcacccatgtattgttgatggtgattcaaaatggtacaactgctctggaaaatatctgggagtccatacaacacaataattacatgactttgcaattgcactctttgagtatttatccaaaacagtgaaaactcatatgtttatataaaacttgtacacaaatgtttatggcagccttacttgtaatagtcaaaaagtagaatcagcccacatattctctaatatgtgtacagttaaagaaactgcagtacatactatgaaatatcagcaataaaaaaatatgaactattgttatatacaatatcttaaatgaatctccagagaatctggctgagaagaaaggtaatcctatttgatttcatttatatgacattttgaaataagaaacattttagaaataaaggacagattaataatggccaggggttagggcaggtgtagtcaggctggagaaatatgaacatagttccttgtgtgatggaactgttccgtttcttgtctgtgaggatgattatgtgaatcagcacaacccagacaggctgccaggtaactcttagttgagggcattatggtaagcaaaataagtcagacaaagacaaatacagtcagtcttccatatcaggggatgtggaacctgtgggtatagacggctgatacggctatgccattttatataagggacttgagcatccacagattttggtatctgcaggagtgctgaagccaatcccttgcagacaacaagggtcgactctacagtacaatctcacttatacgtggactaaaaaaagagctcacagacacagagaacagactaagggttgccagaggcatggggtgggcaaaaagggggaagagggtcaaaaagtaaaaacttctagttataaaatagtcatgatagaatatacagcagggtgagtatagttaataacactgcagtgcatatttgaaagttgctaagagagtaaatcttaaaagttcttatcacaagaaaaaaattctaactacatttggtgatgagtgacttactttggtgaccatttcacaatatatacaaatattgaatcattacattatatacctgaaactaatatactgtgataggtcaactgtatctcaattaaaaaaatttttttaacctggaaaattataaacagctaattagaatagtagagttatatcatctgttcacttttaagctttttctatttctcttattattgctaagaaccttaataatatctttcctacattataaataaaaaatgtattcctaaaaaaaccttaaacctcacagaatggtatcacatgtgtttagaaagtagcagagtttagtcagagaaaactgaagtcatgattccaggtacaagtagggatggataatggtcatatgtcagaaaatgacagtaaggccaagacttgactgtaaaggacagacatggtaaccagaatctgaaggtagattcaaacttaggtactatgttatcaaggagaaaaagacaagtggcatagaactacctttaagatcccagatgctcattcaaccatacgtaggataattaacagaagtcaagaaagctgacctagttgtgcccacttcaaaacatacaaacaaacaaaagcaaaatgttaaagttgagtcaagcttatttaacatcttactgaggactgtaggctggaagagttaacgggggaggtcggtatatatgtgcattcggtgaaggtgaatcttgcaaccaagcacccacctgggtagaaggttaatggtgtcagtgctttgctaagcatggagagatacaaggatccagattcataaaacaatttctcctgaaaatgcctatcggaaggcctcttctgccagttttcccagagcacattctgccctgagctcctttcaggggatgctaaaggtcagtgaccgcacagaccaaggactcagttcttacagaaactgcgggcaagaggtgttttttagttggcatttgtatcaacaagtcaatacaggttgtcaaatggcactgctttattggaaaactaactcagcagaagaaaattcagtcccttgaggtaatagggtactagccaaagcaccaagggaaaaagatacaataacaactgcacagggacacagaagtcagggtagatctgacctgaaacggaactactgacctggggctcttttgatagttaagtttcctagaagcatttagcttgaagaacactttcaagtagccaaaaccaaaacaatacaaagctcaaggtttatgatgtgccatgccaaacaaaaatcagaagcagacagacagaatttcatcaaatttaaacactatctagagatttccaattgccacgaaaatcttggggacaggaacttggtgagtaaagtcatggaagataaagctaggaactaagagactgaggagagctttttataagattgtgtttctcttaattctccctccaacacagcattgtaaagcagttatcttccagttaaaaataaatttaaaaaagagtgtttaatagttaaagggtaattctctaagacagctatgtgatttattcttcacttctttcaagttttccttcaaatgcccccctcatcaatgagcgcttcctaaaactctctacatacaacatcctttttcctaataaatatagttttttttccagacaacttatcaccatatgtcctacccttcctataattctctactagaacctcctttttcctaataaatgtagttttttttcccccagagaacttattaccatatgtccaaccatacaactgtttgcttattgattgcctgtattcccacagtaaaatataagcccaggaattctctttcttgctgctatactcccgacacctagaagagctcttggcacacagtttgcactcagtaaatatctgttgttgaataaacaaatacagcataccagagataaagatagcataaccaggaaaaataatttaaatgtgcttatcctttccctatccatataaccaggacaacaatccagcaatctttctcttgttttgatcagcctgaaacagttcgtttttgtttaactgaaaacaacaataaaaacaaaaggtttggctttaaagggggcccttttgtagtcagtccttccggtcttttgtttgtaacctttctgaggcagcactggtaacagctggtattgacaggaagtcctcaaaattcccaagaatgtgaaatcagttgattaaaatgaacacactggcaaaccaataaaaagaagtgaccatgaaaattttgttctgggaatggattactagtggcttagaatcttagtgattaattcttccatgtgcctttgcatttaatatatgttaaagagaaaatcttttcctttgaattttggcttggttaggctagattaaaagcaaaacatctacataaatgcttaaagtcaacggtatttctgcttttaaatgtatttgcaatcgtgttcacagtatgagatcttaaaaatatgtcattcgtttaaaaaaggaaagaaagaaatgaaatgtatatactcattgcccttctaggaatttagaatgaaactagttatgaggcatccttcagagaactgaggagacaatcactcaaaatatcttctgtgtttttggttgagaaagagatgaccatactagtgagactattgctgtttttgttgttttagtcactaagtcacatccaactctcttgcaaccccatggactacactaagacattattaccaggcctggctctagtcatcaagtcttgaaatttgaaacttattcaactttaaaggctagccttctctagacatcatctgctctggaggccctttaactgccttgattgactctcatctccatattgtacaaagctactgttatactctatattacaagtatttccgtgtttttttaaacctaattcagttatatgaatatattttaaaagtgagacactttaagtatcgtggaagtacagaagaggaattgatgagatcgaaaggtctccacagaaaaatgggataaagtttaaagaggggtggatgaaggaatggggaaggaatggagagcaggcagataggaaaaaaggaggaagggaacaactcaagtgtttacagtgataaacatgctcactcaagtaaagtcttacaccacgttcttgcttctctttacttcatctctttgcttgaacctgctacaaccatcattctttacacttttactttgttataaatcaccatccattagcttttaaatctttcttctaatcccacccatccctacaagctggttgcaccgtttgaacttgtgtagatgactctcgctccagtaaaaagtaacataaagtgttctgtgtctgcagtaataacagaaaagtaaatcattttcaaatgatatcaattatcacaaatttaataaatgttcctgttaggctaaaatattttttatataaaacaaatatattctatcaacatacattataaatgttcttttttcaaagtgaggaagttttgcttctaaatctaaatagaaactttatcgtggaaaaatctaaaatgagaaaactctggcttttttcataggtgtaaatttgagatggaaaaggaccctgacgaatcacttctcatcaaggcaaatatttcttgtattcaaatgaataaaataaatttagaatgtttttcttacatttaaaaacttcactgtttcacactcttttaaacttgaatatatttatttcacatactttctcattcatttttttgcatatatttggactatcttaaccttccaacaaataatacattttcccaaaaccaaaatttgacattgggtggttttcccaaattgagagccaacaagaaatggcatactttctaccattagatcatgatttgaagtggttcatgtgtaaagattcacaatgtatttctgagataaagcaaatttctttctttgacaccctggaatgttttctttcactaaatgaaaactacacaatctactttattctccttttctcccttgtgccaaatgcagcagctcccccttacctagatttttctgcccttcccattcttctctttcccatgcatggtgtattattttttattcttttactaatgtgttcaaaaatttatgttttaagatttttattttttgctttttgcaaatatttattgcattcaaaaggaataatttttagaatggatatgactaatattcagaataatttctctcacatttctcacatttaaaaacttttaactgtgccaaaccaactccctttttaaccttttaaaatgtaggtataatttacataaaataaaaatcctaaatatttagttccatcagttttgacagtttaaaaattataacctgctttaagtcctttttggatgaaatgaaaggtataaatgaataaataattagttgattcattcatgacttgatctatgactacctggcagggtaaactggtaggactggaaataagaagaataagacactacaacaaccatatagataagagcagcggggtcagtttaagaagacagcagtgagaataaagaaggtataagataaaactgatattactatcaaggctagaaataaccaacatgaaaaaacaggaagaatagctaaggagcccactttacacattatatgtttatagtggtgttcaagaaagcctattttgaatcaggcatgaaaaagtagaagaccccctggagaaggaaagggcaacccactccagaattctagcctgggaaatcccatagacagaggagcctagtgggctacatatagtccacggggtcacaaaagagtcagatatgacttagcaactaaacaaccacatgaaaaagtcagatttcttgccttctcacagccacagttatagcagaaatttagtaaagaactcaaaagttactcaaatccttacacttataagttaacagaattctctctcaaactgataaccaaaaaatagttacacaactaaaacacaactatatcattactagagtgataaataaaatatgtactttgaaggctagctagttactgacctgacttcttcataaaataaaaatttgaaaagtgatgagaaaagtgaaaggtaatgagattcataaaatttcaaatcagctcttaaaaaacccatataagaaaccgatagattcccagatttaactttgagaagtatgttgttgttcagttgccagttgtgcccaactctttgctacgccacggactgcagcacatcaggcctcccttcagaagtatacagatctcataacaaactgtatcaaatacaaaagcacctattaaatatacttgagtacttagatttatttaactgcctttgtaagtagttatttcataattttcatatcttaatgtaaggaattttaaagttatctaatttcactttggttccttaattagaagtcaaattaaatattttgaaacatctagcattcaatgatcttcccattcaaacagtcattctgctgttgcttttcctcagtagaaacaattctcaataaatacctgtttatccatataattcatgcctcagtaaacatgtgagtatctactaagagccaagcactgtgtaaaacttggaaatacaaacatacactaatatactgataataacagaaagtttatttcaatgaatagtgatctatccatttttaagcaaatgaaacatgaaaaaactacaaatgaacaattaactaaatattaagtcaagtgaataacatcaatatgtggacgaatattccaatgtctcattagtttactttacgggacaatgccatattcaaaatgaaagtaaaagtaaacaagatcagggcatataactgattatatttcattatttaatgatatactaaagagattgtcaatttgaaagtagattactgagaaactataacagaaattcttccccaatgagaatacaaacttattaactactcttattactgttcactctaagttttcacctgtcttatgaacacatactgcctctcttccataccaatatgatacaaagaaattcagccttctaaagttttaagatttattgagtgcaagtaacattttgtgtgtcacttgattataaattacctagtcaaaacaacaaaaacagactataattcaggggatattcatcaacaaacaacaaaagttgctgatcttggtgagagtgcagtccaaattaaaaaggttaaaaatcagcataaaacatactgcaaaacatcaggtttaaattagctatgtaattcatgaaagaaaaataaattgctcttaaatttccttcactcataccctaaaggaagaatttcagcccgaatggaaccaaactagaaaataataccaacataatacaactagatgtagccttctctgaaaagtggtaatataaaataagaaaaaataagaaaatgtgtccatagattgtgatatcatcactccttgaggaagtaacatctatattcaactacctctttcccacatatactttcttctgatttctttgggctttaaaaatgagtacactttaaatatacagcgagaaaacactcacaagagcttttaaatgaaaacaaaatctgacccatagcccaatatatcgttaatgtcataataaatggggtagagggagggctggttgggggggggggcaagtgcttaaaataaaatgctgaacctaaaatttagccaagtagtgtaacttttattttccaaaacttatttcaagcaatatagggaaaaaatatctttgtttacaaagatgcaattttgttctgtaagaatactactactacaccaaacagaaacatttttaaatttattcttcagtaaaagtgattattaaaaaaaaaaaggaagtgctataaaatattaatttaattttatagaaaagaggaaagaatgtaagataattgtttatgaaaaagtaaagagattcaggattggagccattcacaaccatggcaattaaattaaatcctgaggagcaattatggaaaacagaagccaagggtggcaaaatttgggtctctcaattcaaatcctttttacgactaaagatgaaatttctctcttttacagccaatagattttttaacgttatattaagttaccaccaacaatttataaatatacctacacattttagttccccctagcccccaaaaagtctaatcccaaacacagaagcaatcacatacagattttttcctccctctcttgattactaccaaaaagaaagaaagaattaaaaaaaaaaaaacctccttgagagcgtagccaacattccagaaggcatttccgcaaaaaaggagttaaagggcagactgctcaattaaacagtcaggggccctttgcaagcctcctaggtatatccccagcagatatggtatcagattaaaggaactgcaaacaaactgggctgaaacctttctttgttcaagcccagcctcttcttcctgtgatgtcatattacaaatcgagcaagcctctctttttctcttcagagaaagctcgtctcgcaagacagctggcaactgaggaaaaggcctccgagtcagcaggagcaaacatgcttaggaatttatttcggaacctttgaaagactcctctgcttacccctatctgggatccaccgcaggaataccgaaaaggaaaacttcatttaaaaggtgtaagaaacaagtgagattgaactgggaatgtttaagtctcagaaactttgcactgaaaaacaaaatgtaattgctaacttcagcttaaacattctgcagcataaagaaactttcattttggaatattcatcttgaccacggaaacagaagtttgtttacaggatgaggagttttactccgtgtcagaacacagtttttatttaaactttataatccaatggattggcttcatagtgtttttaatacgaagccctgggatcacagatcttctggagacttgaaaatgaaaattttttcctgttgaagaatcaagtggaaactttatagccacaaacttcatgtttcttttggaagaaaaagaaatatttgtaaaatcttgcaaagatccaaaggatttgcaaatacactggaggttacaaagtaatcacgatctgaatatcaaaggagactgttgctgaccaaaggacttcaacactgtaaactggacgtgcctttataatggtaagcaataacagctctgactgcgtatacaatgactcctttaagtacaccttgtatgggtgcatgttcagtatggtgttcgtgcttgggttaatatccaactgtgtcgccatatatattttcatctgtactctgaaagtgcggaatgaaacaacaacatacatgattaacttggcaatgtcagacttgcttttcgtttttactttacccttcaggatattttactttgcaacaaggaactggccctttggggatttactttgtaagatttcagtgatgttcttttataccaacatgtatggaagcattctgttcttaacctgtattagtgctgatcggtttctggccatcgtctacccatttaagtcgaagacgctgagaaccaaacgaaatgcaaaaattgtttgtattgctgtgtggttaactgtgatgggaggaagtgcaccagcagtttttgttccatctccgggtaacaatacttcagcaacctgctttgaaaattttccagcagctacatggaaaacctttctctcaaggattgtaattttcatagaaatagtggggttttttattcctctcattttaaatgtaacttgttctagtatggtgctgagaactttaaataaacctgtaacattaagtagaagtaaaataaataaaactaaggttttaagaatgatatttgtacatttggttatattctgtttctgcttcgtgccttataatatcaaccttattttatattctcttatgagaacacagacgtttgtcaattgctcagcggcaatagcagtaaggaccatgtacccaatcactctctgcattgctgttttaaactgttgttttgaccctatcatttactacttcacgtcggacacaattcaaaattcaataaaaatgaaaaactggtccaccaggagaagtgactccagattctctgaagttcaaggcacagaaaactttattcaacataacctacagatgttgaaaaataagatacctgacaatgaatctacaatataagctgtctgaaataagaacaccaggactttactgggacagaacctctaaggtccttcaactgtgaaaattgttttcctggacaacaatttttccacctcagaaagaaaataaacatgtggacatttaaaagtttttagtattaaaaaagtatttgctgtgttaagcattaaaatgtattctgttcttgtatacactcagttttatttttctgagccactttgatttgtacctttctcttcattagaaaaaaaaactctagaaaagttgttcaaaatataaaagtaatcatgatttaagtcatgtgataaccatctgtacggtctttgaatatctgattttatactaaatatttaacaaatattaaaattttcatttaagtgtttaatacctttattcagtatacatctaattttgatttcagtcttaattgaatctctaatcatgtttcttaaactataataacataaatgagaaagagttatttaaagaatccataagtgtctttagagtatttttcaaaaagacagtaaaaatgtcttctgtagaatgacatactgacactatttgaggatgtcgagcagttacacttacaggtaatatttaggattttgtcttggtatgcaatttataaaaagcagagactgtatatatagaatagtatactttaaaattacacttttggttcattttctgcatttaacagcactcaatttaaaaacaatgtatgttgtggaaactaacaaaatgttattttgctaagtaaattttaaaaaatactactacaggtatattttaaaggcatatttatgtcacaataagtaacttgttttttaagtattttagatcagagaaataacatataatacttgacacttagacagtgatccatacatatgttttgattatttaagccaaacaaatttttaaatgtctagaaatttgtattttccctttacagtcaattagtacttttctccatatagaattctaggcttacaatcattatctttctgaacttttgaggccttgatccatctttctttaaattgcaaggctgttaagtcaaatattgaatagctgaacaatattatttcatgtagacaagatgttattgtatgtcaaaataacttgtgaagtaaggacacaggtccttccataaaaagcagcaaaactagaaggtcacataactaagtacaattacattttcattttactaaacataaataaggtatcgcctagagctaaaatttagatatgaagcactatctacactgaaacgctttcattttccaacatatcttttattccccaaattcaagcagttttccaaagttaactaaaaaaattatttattagcattcaatctatctgattttcacattttcaatctttcaagtcctgaatacaaatttggataaacaaaacactctttaaggtttaagtttgaattttgctgttctctgggtttgagctgcaatggtttcaaataaatcacagaagtaagctcatatcaaaactcatttcaaaaaaaataacagtggaggattttcttgctagtaagtgatagtctcctttaagtgaacctaaaacaaaataaatcctttaaaaagaaaactagtgaagaaattaaacacagctctttttaattcccaagagaagtatatatgttgtaaagatgttttcttcaattgaccccgaagtgcctttatttgataccattcttcagaaaaaaaaaaaaaacacaaatatatttagcactctaaacatatatttttgagttggaaagcaactaacaatttaataatacagaagaaaggtgcagagcttgtaagatttcaaagaagttttcttggattaagtatctgagcaagaattcaaaagcatggatattattttaaaatataagcaaaaatagtcatcagatagttgttactactggagaaatttttgttgcctgattgtcaacaggaagatgaatcaaaaaatttgtaagactcttcttgaatacataacagacaaatattagttttcctcaactacaacttcaaatcctaggtaaatcttaactatagggacaaagagggtacaaaagttattcttctctgctggttttgcatttttaagtaaattatacattcagagggttatttctttcccttttacccagaaaatctgtattaagaaaactcagaatttactttttgtttccttagaatgacaatactagcccctccctcccccaaaactgcccactgttttttacatctttaaaaagagtagataatttacctaatcttcctttctgtattaaagtaaaagaattaagatgaaacgttttgaagtgtgtaaaaccactttccagaatcctaaggatttcgaacttagaagtgatcttttctaagaaaatcaaccaagtagctagtttaccaaaagaatgttatgaaaatatatgtgttatatccacagaaaattaaaagaaacttaaggcattactttatcaaggagttttatcttcatatcctacattcaaaataccgagagtcaacctgacgtataaaccttaattatgggattggtatttaaagaattagtgactcatttgaggaatagaaaatggaacatcagcaaatttcataaacccaactgagaaacatttaacttataactggtatgcagctagcaagaacctgaggcaactgcaattttagacctctgatgaacaaggtacccagtctttcgtcactgtattaagttactcctgccctgtggactaatctttactatctcccaacactcaagaactttttaataactgcatgccacatccaaccccagatatcacaaatgagggaagatatgacccttatatatataacattttataaatagtgcctactagtagatgaatcttaaggaaatcctaagggaaattattttttaaaagttcttttgagctgtcttgaaaaccaaataatccacttataatatgacttctaaaaaataaaactccaaaattaaaagaatgaatggataaatgtaaaggcacagaacatatttaatcaaccagagtatttaatgatcaacaatattccttaaatagcaacattttccagaggtcaacattacactatcctaaaatcactagttcttaaatttcttttacctctttcttcatttttttcatgacgtctgctaccaatttttttgactgtcaattttataaaagtacaaagaatatcacttaaacacggcaataatccaggataataaaagaatatgaaattaactccaggcaaacttttctaacaagtctttctccttccatctcttaaaaagatttatttcagtaactccttaaaggggaacaaaattaccagtgctaaaagcagtggccgaaacagaattcaagatataggaccccagaagtagagataattcacaaatttaatgaacggttttcaaactcaaaatttgctttacttatatagattcaaccaatactttttgaaaataattggaatatttatggccagcaggaatgtgaaaatatattcaacatcactaattaaaacaacaagagatattacttcatacctgttagaaggactattctcaagaagagaaggactaacagtgttggtgaatatgagaagaaaagagaaccctcccacagtgctggtgggaatgtaaattggtacaactatggaaagcagcatgagatgcctcgaaaaattatgaatagaactaccatatgatctagctgttccgcttctgagtatttatttgaagaatatgaaaccattaactagaaaagatatatacattcctatggtcattgtatcattatttttaatagccaagatatggaaaccacctaacagcccatcatcagatgaatgaataaagagtctgttatatatctgttaaaaaaaaccttgccattttcaacaacatggatagatagatccaggaggcattatgctaaatgaaataagtcagatgaaaaaaagataaataccaaatgatttcacttgtgtagaatctaaaaaaaaaaaacttgtagatactgagaacagatagtgattactagaacataggggctgaggggtaggtgaactggtgaagggcgtctattgtatggggatcaatggtttttggtgatgatctcttcatagtgtatacagctgtcagactgcagtggtacacacatgaaatttatataatgttatataccaattttacctaaataaaaacaggaataacctatggaaataaaatagaatgagaaacaaatatgtgcttttacagccaagttacagttattagtcatagggtgaatgtgttgagtttcattatcttcctatcaaaatgactggtgggaaattcataatttaaaactgaaagagtccgggggtcatttatacaacttctttatcttaggtagaagaaacggaagaagtaaaaggccaagtaacttcataaggtcacataacaagttaaggtagagtcaggtaaattttttttttaacttgtctactcctttaatggtggtaaagggagtagcagatgcaaaggcctccttggagagaacctggtatgttgaaaagattagaccaaatccacagggtctggagatggagggctgagatccctcataagccatgatacagccatggcaagctctaaggaggtgggggggcgcgctgaaggattccaagtagaaggaaagacacgagcatgcatttcaaaaaactcccatccctctgattatagtgaagagatgcatttaacttcaggaaaaagaaaaaaacaatcacaaaaggagctatatttatttcatttaaatttaaagagattctctatgtcctttcccccttattaaactgctttctttttgaaatgatggtgatgatgagtaggaagactattttaatgtgtgttacttgggaaaattaagttagcagccctgcggagaaattgataacattcatatactgctggtgggaaacaaaatggtgtaacgctaatgggtgggaatttggtgcacgcacacacacacacatacacacatactcactcactcctacccttttacctcagcgttctgatttctaggtacttaccttgaagacacattttcaataatataaaaatgcatatgtgtacaggatgcagtactgtttgaaactggaaaacactgaaaactccctaatgtccaagcacaaaaaattggttgaataaattacaacacatatacacatattcacagtgcagtatgttagtctttgagaattcttaaagagtataataaaaatcttaaagagaaattatctgttgtaacttaatggaggctgaaactgagcaaaaacaataaaattttttttttggcaaagcatgagacacaaaatacagctgtttcctattctaacttttcttatcatgttctaaatctagcacatacaggaagacaccaaaaatacctttgatatctatttctgacagtagcactaaatactaagaaccaatattcaaattaataaagccacatatgcaaaggccacttgaatgcattttaaaacagactagctgtgacagtttcgtttctaaaacatgacataaaaatctggaaaagatagatgtcagaaagttggttctattgtataattgaaagtaactgaacttacagtgtttaagaacaattgccctagagtggttctaaaattttattaaactcactattaataacagcttctgattttgctggaggaattcagaaactacattaaatagaactgagatttcataagatacttctttttttttgttccttgcatgtccagatttcagagtccttcctcactgttacagttaggatacgacatgacactagtttagagactgaaaattcttggactatattcaggtaattttctaacatcatgactttatagaagacactctctgaacaagagtacaagtgcctccatttcaataggttaagtaaagaggatatttccaagctattcttttacaattgccatttctcttgtttgtacttgactaatgaacactgacctcagggtaattagtgacatgattcacaactaaagcaccacaacaaattccaacggcagtgtaacagagaacactgcccacatttaacaatgctggagttcagttacacctctcttcccctgaacttactccattctgagaaggcagtgagagaaacagaggtacatcagaagagaaaatttctacacacttgtaagccaggacaaacagatccaatactgtttaactgtgttctcagtcctctgttcttaggaaatcactgtatagtagagaaaatgaactaaaagacactaataattaattgtgatgtttctaaaagataccattctcataaatgtacatttattcctcatggcaaccctgataactatcatcacgcccattttacaaatgaggaaaatacagtctgagctcagacacataacttgctgagaatcacaccaagcaagttacatggcatatctgaatgaacctcagattttccttgtctgtaaaacaggaacagcaatgtttatcttctgggaagattaaatgggatatggtgacgccaaaacccagacagaaggatctgctatagcacagtgacacaaacacagataaaacatgaataaagaaactaatcccaatagtgcatacacctggtggtaaattaatatacaccacgaggcagcacaaaggttgaaagtaccgtctctgggaccaagccagtttgactcaaaattctagctctgctatcaacttagttttctggataggggaaacgttcttaatttctctgtgcctctgatttttcatccatgaagcggtgataacgagagtatctatcttcatacatttgtccgaagtaaatgagtgaacacatttcggcacttttaacagtgttggatgtcacctactgtcacttctacactggaatgtaatatgcataagtgagggtcattttgatgtaggtctgcatgatgatcagattccaaagaacctagtgatgagcttcttacaagcactgcttcctatagcaagtctctatgagctacctaaggggcatttctgagtttgagatttttatgttcctgaatttctttagtcctttgtgccaattcatgaacaaggagaatgtgtcacatggatgatgggggaggggaagggagccacgaatggacaattcatgaatacttttcctccacagtgaactcgagcaatttctcatgtgtgtcagggtgttccaaagattaaaaaaagagacaagtgcatacagaaaagaacacactgaggagtcaagccccgggctcgagacaagacggcacttgaacaaaggtccagaggtggaaaaaattttatgtttaaaaccataaacagatctggatcaagaactcaggtccacataaacattcaatacaggagaagatgtggaacaatttataacagctatctatctcagtttctttgggttttctgtttgtagttttttaacgtatgaagaaccacataaaaaaactacttaatgcctcactgcttcttcaatggttcaattatgaagaaaagttattttattaaattgagcttacctagagctttctaaagcaatcacttatttgcatttcagtggataattgtccatatgaactaagttactatccttatttttgtgctttttctgtatatctgtatttttttttaacttctctctagactactttactagtagaacacaaggtccctatgaaatattttatttataagatattgccttcctttatttttcattcttggactttacatttttttcattcttacagaagatgttaggcatacctgaaatttttcttttaaaactcagaaagaactcagttttaacatttcaatctataaaaagagatctagttttccatttcacctcattctcacccttcccttcaatctccctgagaattgattcaaatatctaattttctcaactctaaactacatatacaattacaggttttaaaaatacttatattactatattaaaatatcattcagagagttatataaatggaacatacagatgcacagtaacttcttttaaaatcgagttttctccctttggaaagtcttctaatcttttcttcctgaggaatctagtagatcaacagtgacagtacaccacacaaaggagtgcctcacaaagggctgcattttctcccgtttccagtaccaaccagctccagggcagaacagtcatcttgttactcaagataaaaaacgtacatgctagttttttcatttagaataaaattttatactgtcttctgtgctggactacatgctacagtggtaataaaaacagtgtgaatgaataaacagaaataatgtggcacaatgaaaggagaactttactagactaacacgaaatttggaatcaaaccagtctgggttcatatgccaagtgggtgactctagacaaactgcttaaccttcctgagcctgcttccacttttgaaaaatgaaaacagtattaacaacatcacaggatgattatgaaaattaaattagacaaatacttttggtgcacagcacagtgcaactagtcaaggagtattagctaccttccatctatggctaatgagctgctagctgggacacagattcctaggttcctcctcatatgggaaattagattcacgcctatacctactttgtggagtcagtgtaaagaaccaagagagtacttcactttaaagtcaaaatcatgtacagtcatctaggatttggccactctaaagagtggtccacgggctagcaacatcagaagcacctgggggcctgtaagaaatgctgaatctcaagtcctgccctagaaccacgtgataagaaaatttattttaataagatctccatgtgtagtaaagtttgaaaaatactactaagaaaataatcctctgcctagaagaaagaaaagaacattatcaatatcaactgtgccaaaaaccccaaagtacaaagggcatttacaatagaacatactgatttaattagctcaggaaagcaagttagagaaaacaggcatcacggactgacagaatctgaaattgtgagaaatacagaataattcacaagaaaagggagggggaaggcagaaaaaaaaaattaaaacactgggtaaagagcacaatattttccagaagcaaatgggcactctcacccatgaataataatgtctataatgatgtccctagctcaaaaagtaaaattactttaaatacactctgcctaagaagacaagaaagcatatatattctttcaaaattatttccctcaaaaaacctgtgtgtttacacacatgcacgcatatacacacatatattttatttttaagtagtgcataaaaaaaattcaaccctgaatattcattggaaggactaatgctaaagttgaactctactttggccacctgattggaagaactgactcactggaaaagaccctgatgctgggaaagattgagggcataaggaaaagggagcaacagaggatgagatggttggatgacatcactgactcaatggacatgaatctgtgcaaactccaggagatagtgaaggacagggaagcttggtgtgctgcaatccatggggttgcaaagagtcagacacgacttagcgactgaatgacaacaacaaaattatcttgtacattcacttttgtacaatatctcatttaccaagagagctagctctttacttttaaagagattaaaaacagacttttgagactaatttactagtcttaaatcaggactcatgtaccattgccaatgtggtccataattttcccccaaatatctttccacatttccacaaccagtttgttttttcccatccactttacaattgattactccctcctttgaccctcatggcttatcttatttcacagtatatcacaatgatttagtttcctataggttccaagcctctttaagggtaggggctatttcccatgtcattagatacctcgctggggcaagtacaattcctttcaaataactgatatataaatatcagatacgatccaaagagaattgggaaaaactgaggtaaaggagagcaaggaaatgagacctctctgttatccttttttgaaaaatgtttcttcaacattttatacattgtaaagcaatctaaagaagtggcacaccttcagcagtggcaaataattcttaacatttaaatagttttgtagaatcataaaatatttgagctagaaatactaaaatctttttggtctgtctcaatttacaaagcaagaaactaagacagaaacattaacttatacgtggaagaggcaggctctaaatgtcaggtcttctgattcccacattaggccatactcactctcactatgtcagtgtggtttgctccagagatcaaagaactctctgaacacagtgtttcaccatgttgcaaaggaaggatactccaataaaaaaaattaagaaaaacaaaccaaaacaacaataaacatagggagtgcttaaagaacagcagaaggctagaaaggtaatgcagggtccaattatcacaaccagagtaaaaaggctgcatttatctaatggcaatgggagctactgtgggtttctgaacaggaacattgcatgaaaaagcatttaagaatattcactcagcaccaaactatagaatgtagggtagtcccaaagctgggagaccaggcaggagtctatagtagtatgttcaaggtaagaaggtaatgatatgatctagaaaaatgtaaatgaaaatagataattaacatactaaataaatatgacacatggtaattttttttttggtttttgtatttataattactgatcaactttaactgatgcttttgaactgtggttagagaacttcttagagaagactcttgacagtcccttggaaagcaagaaaaccagtcaatcctaaaggaaatcaaccgtgaataatcttgtggaaggacagatgctgaagctaaagctccaatactttggccacctgatgtaaacagttgactcactggaaaagaccctgatgctgggaaaaactgaaggcagaaggagaagagggcaacagacaatgacatggttggatggtatcactgattcaatggacatgaacttgggcaaactccaagagacggtgagggacaggaaagcctgacgtgctgcagtccatggagtcgcaaagagttgcacacgacttggtgactgaacaacaacattttatattacaagactctataaaactacagagaaaaagaagaaaaaaatgttcactattcaagcctcgatgacttgaatagtaaaatgtaaaaatacaaatattgggaagcaaaggtgtatgtagaacaaaataaaataattttagctttgaaaggtaaagtcaaatattctaaatcacttgaaagcgcctacttaaccatgggaattaagggcaagaaattaggagtatgctgggtcagaatgagaaacattataaaaccacagtgatgttttcagaaagaatcagatttttaaaaactaaaatgttttgctggataaaagataaatatatgcttacttaaaaaaaaaactcatgaggagctttaaaaaaacccaacataaagcatttttcattacagtagcatggttgctgtataaatatagtatatgacatcatattacctcaccatccttatttttttaagtgttaaatacagcttaatcattatcttacaattcgtttgccttcctgagacactgctctttgtaaaatataacttttgaaaaaaactaacgtctaatggtaaatactaaaaccattgtgcaaagtgcaccagaggttaatgatctaccatccaaatacacaacagatatcctttttggctttttcagagccacaggcttttctcccttttgtgttcatttcctgtcaagtttgacatttcaaaagaataccaaagaagcttaaaaatttgtttacaagtgtgtcattaaatcagaactctaaaaataaaagctattcattgcaactgtactgatgtataaaagaggccttcatttaaattttggaaaaataataaaaaaggaaacatttttaatcttttcttatatagaagtgctctggtccaatatttttgcaactgaatgaagaaacttgctgaggtgtagtgacaacaaaaaaaataaaaaaaaaacacacacacaatagaatccaatttaatgagtcagctatatttgatagtatttagaggaggctcagctttcttatgacttattaaaatttaatacaacaattaattactaatacttctacgttctccatataataagtatcctccgaaatactattattcagaagatatgatgcatttaatacaggaaaatagaaatgaaaccctaaatattctttaagtatacatattcaaaaatctttatcaatcactaaatactatgcataactcttttggctgtgataaaggaacagagaccagatttgtcttaactacaaaatcaaacaacataaataatagttttcagacactgagtacatgctagtaatagaacaagcagtataagacagtaattcctggggggaaaaaaagcaaatgcttaagctccacctttgcctggagagttcccaggttacaagtcagggaggagaaactgaaatagacctcagtggtctccctggttgaagaaacagaattgagaattcaagacagagaaattaggaaaattagcaggacagagtagcagaggagagacttacacagaaaagagagagttgcaaagagagcgctccaggagtctgcagagagttactctcggtctttaccccagtcctgatcaccgcctgcaaactactggaggccaaaaaaagaagcatgagaagaagcagaaccattccaggagctgtaacagggccaagaagagttctgattgccaccagccagtctggaaaaacctggtaatgtatgagacatcaggtagagcacctagaaggggattgcctcaagagtggggaaaaattagtcataagattaaagactggctttgtctagaaaaaagaaaagcctttaaaggatcaaacgcttccaagtaactaaactgtgtcccaagacacaagaatagtgaaaggaatatgaaaatatccaggaccactaaggtagaaattcacaaggcctggcatccaataaaaagttaccaagcagcagccccctcaaaaaaaagacccttcaaaagagaagtatcagtcaatagacagtactaaaaagatatagatgttagaattagtggacagggactttaaataattattataactatattccagatgttgaatgtaaaggaaagcacaggcatgctgaagagagatatgaatgatttagaaaaggattcaaatcagattctagagatgaaaaatctaatacctaagattaaagcacagtagatggaattaacagcaaataagacatttcagaagaaaacaattaatgaacttgaagacacaggtgtaatagaaacaatttcaagtgaaatagaaacaatttcaagtgaaacagaaacaaaacgtctgggacagcaaccagagcatcagggagcagtgggacaattttaagtgacctaatacatgtgtgaccagaatccctgcaggaaggggtgaaaggagtcaacaaaaacattttgagaaaataatggacccagatttgatgcaatgtataaggccacatttcaaagtagaacgccaagcaagagaaacaggaaagaaactgaattaaggcatatcttaatcaaattgcttaaaacgagataaagggctgctctgtaagaagggcaactactataaaaccaaaaatgctatgctgctgctgttgctgctaagttgcttcagtcgaatgctatgagatgcacagtttctcatatgagaactcaggaggataagatgaggagggggaaaaaaaaaacaaagggagggagaggtcagcacataccagatagaagcaaggtaccagacttctaagaaacattttagaagtgaatcttgccccagaccccagctgacaccgcatggtctgggaggaactgtccagtctagctcttcccagattcctgacccacagaatcataagcaaaataaagtgattgttttaagccactaatgtgccactcagcaatagataactcatttatatcaacatttaatccttcctttcccatcttgaaaaataattatcctgctgcctcacatacctccagctatacttccctttacagataaaactggtagaaactatttataaccactgtctccatgttatctctcactcataactcagccaaattccactgagatggactcctgctcccatatcacttctgacagtccttgctaccttcaccagcggcttccttgctgccgaaactaatagccactcttcagttgctactgacttctcccacagtatctgaaatagcaagcactcagaccttttcattctctctttatgacaccatttctaatatttctccttagtgacaggaggattccttgatttgatctcttttgtaggcttctgttttctgtctaccccttaactgttggtgctccttaggattctgtcctaaattacattctctttttgtactacactctcctattaagtgactttattctatttcctaaactttagtcatttggtaaaacacagggatttatagttttggagccagagagacctgtgtttgagccataagctctgctgtttagcttatatggtttagggtaagttattaaacttctctaagcatttttttccctcatttagaataataatacctcatggattattatgaaagtcagatgagataagtactcaccatagtgtgggtgacacaagataaactgtcaataaaagctggtaatttctgatattatatatgtgccagcagctctcaggtttctgttcctggcctagaatttctttcctaaactccagacacacatacccaactgcttctcgacacctgtacttgatggtctacaagcaattcaaactcaacataatcaaatttcacctccaaggaaatctcattcacttccagctatctttaatgagtgacactaccttaatgtcataagttgaccctttctctgtccttcattctcactcatgtaattaactgccatatcttataatacaaagccagagatgctgttccaagtgcttttcccatacattaactcatttaaaatgaaacacacacatgtaataacatacaaagtttataaatgaccaggaagtagtattgatcaacactgtaagactgcaaaggaggaaagaatgactatagacttaggatggtctctaaaggcaaagtggaagtagacctgaaaatctggtaaataaaaagggcaaagtatttcaggtggacctataaagtgaacaaagactcagaaacaggcacagacaaatatggatgtgtgagtaatagtaaacagagacatctgaatcaagaacagaatataaggaaagtattctcaaaatattttggactcagcatcttttaacattcttaaattattgaggacccagaaatttttgttcaagtgaatgtgtctatcaatatttgagagccccttggacagaagaccctggtgggttacagtccatagagtcacaaaatgttggacatgactgaaatgacttagtacgcatgccatattactgtgttaataattaaatcttaatttaaagttaattaagaaaactaagatcatggcatctggtcccatcatttcatgggaaatagatgggaaaacagtggaaacagtgtcagactttcttttggggggctctaaaatcattgtagatggtgactgcagccatgaaattaaaagacacttgctccttggaagaaaagttgtgaccaacctagatagcatatcaaaaagcagagacattactttgccaacaaaggtccatctagtcaaggctatggtttttccagtagtcatgtatgaatgtgagaattggactgtgaagaaagctgagtgccaaagaattgatgcttttgaactgtggtgtcggagaagactcttgagagtcccttggactgcaaggagatccaaccagtacatcctaaaggagatccgtcctgggtgttcattggaaggactgatgctgaagctgaaactccaatatcttggccacctcgtgtgaagagttaactcattggaaaagaccctgatgctgggagggattgggggtaggaggagaaggggacgacagaggatgagatggctggatggcatcactggacgtgagtttgaatgaactccaggagttggtgatggacagggaggcctggcgtgctgcagttcgtggggtcgcaaagagtcagatacaactgagtgaccgaactgaactcaagtatacttaaaactgaaaaaattttaagaatgcaatttatctgaaataaccaaaataagcttgctatggacatgagtttgagtaagctctaggagttggtgatggacagggaggcctggcatgctgcagtccagcgctgcaaagaatcagacgtgcctgagtgactgacctgaagtgaactgaagcttgctacgtgttaacagagctaacattttcatggagcctaactctatttccctaaataaacaaaaaattaaaacagtggcagagctttacaatcctgcaaatccttttaatatctagcctatacaacagacctgaattctcatatctgcttctgtatttccttcattgaaatgtgttgtctgtttgaagtatacgaatatctggcctcacacaacatgtagttgaaaaaaggaggagtattttaatagacttttcagataataaaggatattcttttttgacactaccctaaaactcaacaagcagtagtttcttaaaggttaattgcaatgtgaaattggaagtaattttcatgaattttaattttcattgaatttttaatcttaattttcatgaattttaattcatgagttaaacttcacattcttagaccttaaaaaccattgatctatctatcaaagaccttaaactctgaataaacttcttactcacgtatgattttatagcatgatgcatagatcttacaatgctgatgaatctctttatgtaatgttaaacaatcacatttactaacactaccactgaattcatcagaaaagtctttgatgtattgggaagctattctgcttacagtaaatacaagactatcaaaattctaattttcccttgagaactcaaaacttatcactggcaacgtttataattagttgctttcaaccacactgtacttgagaatacagattatataaataaatacttttaactggctcatcagtgatgttattaaatgaaaacaggcatgttttacgttgtttcttttttaactgagagtttgtggtggtgaagaatacactgaccacaagcctggaggggaggggacttaggggcagaaagcatacaagtatatatgtggctgatcactagaaccccttcgctgttcaccagaaactactacaacattgttaatcagctatacccaaacacaaaataaaaagctgaaaaaaaaaaaaaaaaacacaaatgctttgatgctactgctgtaatccggtgcaaaggttccaaaagttttggaataaatgtcattggcataaatgtcaacagagtgaaaaaaagaaataacatcttaatggtaatatgaaaatagctttcacattgcagctcccctaaaatgttttctgggatcaccaggggatcacagaccatactttaaacagctgataagaaaaaaagaagagacaaagcttctaaaagaagccttgtaatcatcaaatatttacttaaaattcccacactaaaaacatacatttgattcctttgaccctctctgtaagctgggtaattatagaactgtattctgaacaccataaatgtttaagttattaagattctggattctgctatttttctcaaatgagtattgtttgtcttaaagcaggtaattatttttactgaacttgagttgtaaactgtttattcaccagcagcttctgtttcaagtcacatctttcgcctcaagctggttttagaaaaggcagaggaaccagagatcaaattgccaacatccgctggatcatggaaaaagcaagagagttccagaaaaacatctatttctgctttattgactatgccaaagcctttgtgtggatcacaataaactgtggaaaattctgagagatgggaataccagatcacctgacctgcctcttgagaaatctgtatgcaggtcaggaagcagcagttagaaatggacacggaacaacaggctggttccaaataggaaaaggagtacgtcaaggctgtatattgtcaccctgcttatttaacttctatgcagagtacatcatgagaaacgctggactggaagaaacacaagctggaatcaagactgccgggagaaatatcaataacctcagatatgcagatgacaccacccttatggcagaaagtgaagaggaactaaaaagcctcttgatgaaagtgaaagagagtagaaaagttggcttaaagctcaacattcagaaaactaagatcatggcatccggtcccatcacttcatggtaaatagatggggaaacagtggaaacagtgtcagactttatttttgcggggctctaaatcactgtagatggtggctgtagccatgaaattaaaagacacttactccttggaagaaaagttatgaccaacctagatagcatattcaaaagcagagacattactttgccaacaaaggtccgtctagtcaaggctatggtttttccagtagtcatgtgtggatgtgagagttggactgtgaagactgagtgccgaagaattgatacttttgaactgtggtgttggagaagactcttgagagtcccttggactgcaaggagatctaaccagtccattctgaaggagatcagccctgggatttctttgtaaggaatgatgctaaagctgaaactccagtactttggccacgccatgcgaagagttgactcattggaaaaaactctgatgctgggagagattggggcaggaggagaaggggacgacagaggatgagatggctggatggcatcacggactcgatggacgtgagtctgagtgaactccgggagttggtgatggacagggaggcctggcgtgctgcgattcatggggtcgcaaagagtcggacacgactgagcgactgaactgaactgaactgaaagccactttgagacaggctttgctggtggctcagtcagtaaagaatctgcctgcaattcaggagagccgggtttaatctctgtgtcaggaagatctcccagagagaagaatggcaacccacaccagtaactttgcctggagaattccatggacagaggagcctggcaggcaacagtccatggttgtttcaattttccagtttccctagtcagaaagcctgagattttcccactggcactcagttcagttcagttcagtcactcagtcctgtctgactccttgtgaccccatgaatcgcagcacgccaggactccctgtccatcaccaactcctggagtccacccaaacctatgtccattgtgttggtgatgccatccaaccatctcatcctctgtcgtctccttctcctcctgcccccaattcctcccaacatcagggtcttttcaaatgagtcagctttcctcattaggtggccaaagtactggagtttcagcttcagcatcagtccctccagtgaacacccaggatggactggttggatctccttgcagtccaagggactctcaagagtcttctccaacaccacaggtcaaaagcatcaattcttcggcgctcagctttcattacagtccaactctcccatccatacatgactactggaaaaaccatagccttgactagatggacctttgttggcaaagtaatgtctctgcttttcaatatgctgtttaggtttgtcataacttttcttccaaggggcaaacgtcttttaatttcatggctgcaatcaccatccgcagtgatttcggagctgagaaaaataaagtcagccactgtttcgactgtttccccatctatttcccatgaagtaatgggaccagatgccatgatcttcattttctgaatgttgagctttaagccaactttgtcactctcctctttcactttcatcaagaggctctttagttcttcttcactttctgccataagggtggtgtcatctgcatatctgagttattgatattcctcctggcaatctttattccagcttgtgcttcatccagcccagcatttctcatgatgtactctgcatataagttaaataagcagggtgacaatacatagccttgacgtactccttttcctatttggaaccagtctgttgttccatgtccagttctaactcttgcttcctgacctgcatataggtttctcaagaggcaggtcaggtgatctggtattcccatgtctttcagaattttccacagttaattgtgatccacatagtcaaaggctttggcagtcaataaagcagaaatagatgtttttctggaactctcttgctttttcaacaatccaggagatgttggcaatttgatctctggttcctctgccttttctaaaaccagcttgaacatctggaggttcagggttcatgtattgttgaagcctggcttggagaattttgagcattactttactagcatgtgagataagtgcaattgtgtggtagtttgagctttctttagcattgcctttgtttgggattggaacgaaaactgaccgtttccagtcgtgtggccactgctgagttttccaaatttgctgacatattgagtgcagcactttcacagcatcatcttttaagatttgaaatagctcaactggaattccatcacttccactagctttgttcgtagtgatgcttcctaaggcccacctgatttcacattccaggatgtccggctgtaggtgagtgtgagtgatcacttctttgtgattatctgggtcgtgaagatcccttttgtacagttcttctgtgtatttttgccacctcttcttgatatcttctgctactgttaggtccacaccatttctgtcctttattgagctcatctttgcatgaaatgttcccttggtatctctaattttcttgaagagatatcgaagtctttcccattctgttgttttcctctatttctttgcactgatccctgaggaaggctttcttatctctccttgctattctttggaactctgcattcaaatgggtatatttccttttctcctttgctttgtgactcttcttttcacagctacttgtaaggcctcctcagacagccatttcgcttccccctatacctcccagccccaggctaaaagcttcctacccaggcccacaacacccttactccatttcttaacccacaacacccttactccatttcttaacccacagcgcccttactccatttcttaactcagctgtctgctctaaaaggtcagtgacttcaggcgattcctttggtagctcagtggaagagaatctgcctgcaaatcaggagacacagaagctgtgggttccagccctgggtcaggaagatcccttgaagaaggaaatggcaatccatccagtatttttgtctggaaaatctaatggacagaggagccttgtgggctacagtccatggggtctcaaaagtccatggggtctcaaagagtcaggcacaactgagtgtgcacaggttttatagttgtatttttttgtgaggagtcatatggtatggtctccctccatattaccagaggtagattccttacaaaagatttttcatctgaggaattagaatcatgagagttgttctgcatttataaaaaatttctctggtggctgtgagagaaacagtgttgaggtagccaaacatgtgtgtagatcaagaggaaaaatccacagaagtccacaaaaaagaccatttagagaataaactacctggtctatttcggtttacaaagattttactgaaaaaatctaacacagtctgaatatactgaaagtaaaatatccaaatctcatctcatcatctactggcatgataaactgcttaacagatttaagaggcctaaagtctgtaagtcatttggcccaatgcttaggcatggttcattttaaaccacccctaatcttccagatttccagaggacaagatttcactatgtttttcaatagattatttagcattttatattcatatattgcctgttaatctctctgggatgaaaaaaaaacagaagtgtgcttatgtcttcttaaagttattctattcttgatttagtatttctcaagactgtgcagtaaaggtactcaatccttttcccatgtaaccattaaaaataaaattatgttctttctttcattaaattaccaacgagtaaagtaagtagcgtctcacttgatgtttccctgtgagtatgttctcataaatatcctcagttcagtgagagattctgactgtaatacagaaacaaaaaaccaagcaggtttgctctgattcttgatctggattttggtatcacaggtatgctgaactgctctaattcttgatctatatgttagcaatgtgggtacattctatttgtaaaaaatcctttttagtacaacttgtgatatatgcttttctgtatatacgttacacttcaataaagaaaaaaatcctacagtctgtgaaagctcaaacttatctatggtatgcccactctctgaagtgttaattattctcacaggaaagactcacatattatgttgtgtggcatgacttatgttcatagttacccaccaccactctgttctgtttatgattaaaacagcagtatgtattgatttttaaaaaattcaaacactaaaagtagtctataatctcatcccctagaaataccaaagttagaatttaaattcagaggcttataaagtccacactactcattattaaaaaactgcacccttgaccagactttgtacatgttacttttcctccaaaaattctcaaaaataaagcaatattgtttagaatcctagaataccagtaactgaactaaacaggcttgaacacaagcaattttcaacagtaaatttctactacttcctctataattttcagagctcgtgtcttttctatatcctcacaatatctacctcaatgcaaggcgtatagcagatgtgtatcgatagaaataaagttctctaaaataaataagaatagtcactttcagatgatacagtaatgtcttgatttcaatttctaggaaaagcgggcatggcaccctctgaaaagtactctatttattttgtttattgatctatgtatttatttttgctactttcactgaactcccagattctgagttttctcctaactactcctttttttacaaagcagaagcttttgtataaaagacttatccaactcaatcatagcaatacagtgtctatcaacttcccctacttctctccttttctatcctctctgtctatacagcaatacaagaaaagcacgaagaaacaagttatctcttagccattacatttttaaaatataaaaaaatttaaaactacgtttacatgaagattaagattctaatataactaaagccttaattttttcactgtcatttctatatgctgatataaatgaaaagatgtaagtttagcatgcaacagtttcaaaagaaaccaactgtatatcaatctacaaacctgatgattaacaaagtattgcccaactatgaagatttaaagagcataacagaagtacttcatataaatgttttattattactacataggaaatataacctttctttaaataaagctttatcaatagcttatatgctataaatagactacctagaatattctttttgcctatacaatgctataagcaataactacacctgtgtagactttagattatctttaacaatgggacaaaaaaaatcaaattaaattgaaataaaaatttgtacttttaaatcatctcaatagcctgtcaattttttttaaattattttgttgaaatttaagaccagacatttaaattttcaaacatgacactcctactttaaataaagttcccaaatactttaaagaattctgctttgttttaagtgccaagctttaagaaaagcaattcataataaattcctatatgagatagtctggagagctcaaagacaccattctattgataatattccacttgattcttgggctctacttggaaatcattaaatcgcatatttgctagaggtaaattttaacaaatatatctcgctaacagataactgttatccatatgcatatgaatatctttaactattttagctagttacttactgagagccatgcaagggactccatgattcgatgttcacatcgttctaaatgtttaatcatttctctggtcaggttggcttctgctttgatgaaactttcaatcactttgtaaaaatcaaaagcttttaagttaaatacattcagaatccatgggaaggatagatctgtcccagtatccaggctctgagacatacttcctaaaaatgaagagaaacataacttaggaatgaaacagaaagtcttgaattacattatttttcagttcaaaggttttattaaacaaaaaattaaaacacactagaaagactaaacaaaaaaagtttatttaaaacagaatttcttattctggagtccacagactcctaggaaataggcttcccaagtctgagggcatatgcatgtctgtctcttttagacagaaggctcatagcttatatcaaattttcaaaggtttaaatattctaaacttgtatcagggacaggcttaacatccaaccagtaatgcactggcatatccattttaactgtctcattaatcgttgataaagaggggaagtgattgtttagattttgataatttggttagaaaaatctgtttcaattgtgcatttcttggttatattagttatgtaatatatttgtatccttagaaaatttttttcttttgttttttacaaacaaaacttttttgacagtcacaagattatttgcaaagtaataatacatgttgaaaattgtattttaaaaaaccactattggtgcctctgttccatttatctggcagatttcagttccaaccttcggtctcataaccactgaatatatatatgtagcagtgcttccttatcagtggaagctgctcaatagtacttctcagggattttacaatctcctaagtctttaaaagggggttaataagtacatttcctggattcagtatagaccaaaatggagaccttgtgaaagtattcccaagatgatttgaaataatccaagttcacaagccgttctaacgtgaccaattacattctttcgtatataatgatctaaatatgcatttcttctccttaatttctccatctcctaccctcctaaaaaacccacacaacacctcagataagttttttaaaactttaaattgaactagaatgtttatttactaaaatttaacttactgctataggtagccattacaacctcaagagcgcatgccaacaaagacatatgaaagatgttgtcattcaggagtttgctaaaggaaaaaaagaatgatttttgtaacatttacttttataaaaaaaaaaaaaagaaattgttttactaaaacaaaaatttacctaaaattttgaatggataatcgttcttcttcctaaaacagatttaaaaaattaactgaagccttctttgcattagcaattaatttttttttctattatattcttttaaacttactgatttaagcatggattccattactcggtaatacaatcggactccaagtttgtatcgctacaaagaaacaaatttaaaaaaatcagatcccactattttagaaaacataacaattactaatttttaaaaagtttagccctgagacacatctctgacccttcttagaaatatggctaccaagagagcacaaaagctagcttgtctaaaactgaggaaactgaaagtgctgctcactcagttgagcccaactctctgcgaccccatataaaatgacggttttcacattcctgataaattttcaagaggaggggtccagtatatggttttcctacattcctacttcagtctacatcgtaacagatatatatgtactaagaatatattatatgttagtgttagttgctcagccatgtccaactctctacgaccccatggactgtagcccatcaggctcctctgtccatgggattctacaggcaagaatactggagtgggttgccaatcccttctcgaggggatcttcccaacccagggactgaaactgggtccactgtattgcacactgattctttaccatctgagccagtggggaacctagtactgttctaaccattttacacatgaatgcaacacttctatgacctagtacatgtatttaagatagctctccaggattaagagaatagtacctttccataaagctggcaaaggcaaaaattagatctaaaggatcttatcagcaaaaagttttaattaaataactagtttccattagtttaaaaaacagtccaattttaaataaacacaaatatacaccataatccttcattccaaattatggccaaaagaacttttaaatataattgtttaaaatacagatggtatcaaaatataacctcattacactaaagtaaatgtgtatagtagattacagttttcaaatatattttatatattacctcagtaatgccacaaagtaaagaaaatatagaaacctgacagctcatatatgaaagagccagatatgaaaccagggctcgaatccagagcccattctcttgccaaatattagttttagattttctgaaataataacagcaatagtaaaagtaacatcattcaataataccactaataaatggcatgtataatattccattcatttaagtatgtgcatacataatattccatatgtgtaaaagttaaagaatatacaacaaaaacttaatatcaacaagattttgatttttttttacttgtactttctaaaatttacataagttttctaaaattttctgcatgtttctttttggtttctgtaatagagtaaggaaagctagctcataaagttttttccaaatagcatcatacacagccgactaggatatggtatatggtagctgccaaaattttatactattagatagcatttatacaacttggacagatactgcatttgaaattatttactacacagtggtactcatcaaaatgagttcaagttacctgtgatccaatttccatacatccttgtcccacagctttagcaaatttctctttaaagatgtccccaatatccttcactcttttcaggatactttcctttggattcactgtacaattctttaagaaggaaaaatagaaattaagatagaggatactgtctaaccagagaattaacactttctgttctataatagcatgacttattaatttcaattgtttatactgtaaaaacacttcacaataaataagtaaatacaactactgaaaatatgagaaatataaagcattccattctgggatgatagggaccagaaactactagactacaactaaaaaatcgctattatctaaattttctgctggcaagttaggaaagatttgttagcccttcccttagccatcaaaaaacagcctcatagattttacaactgataccaaagaaaaagagctattcataaaagacacaaatgaaagtactgcatgctcaaggaaattaatattgttaaaatattcatactactcaaagcaatctacagattcaaaaaattcccgtcaaaatttcaaggtatttaacagagtagagcagctgtatgtagaaccacagaaggccccaaacagccaaagcaatcttgagaaagaagaacaaagctggaggcatcaaactatactgcaaagcagtaatcaaaacagtttgctttggtataaaaacatagatcaatggaagagaactgagagctccaaaataaacccatgcatgtgatcaattaattaccaaaaaagagtcaataatacaaaatattaagtaaggaatgggacaatttctttaataactgtgctgcaaaaactggataaccagtttcaaaaaactgaaattataccactatcttactctacacacaaaaattaacacaaaatgaattaaagacttgaacataagacctgaaaccatgaaactcttggaagaaaacatggatggtaaactccctgtcgttagtcttggagatattttggagttgactccccagaaaaaggtaacaaaagcaaaataaacaagtggaactatttcaaagtaaaaagcttctgtaaaggaaaggaaactatcaacaaaagaaaaggccaccttggatcatggaaaaagcaagagagttccagaaaaacatctattttgctttattgactatgccaaagcctttgactgtgtggatcacagtaaactgtggaaaattctgaaagagatgggaataccagagcacctaacctgcctcttgagaaatctgtatgcaggtcaggaagcaacagttagaactggacatggaacaacagactggttccaaataggaaaaggagtacgtcaaggctgtatattgtcaccctgcttatttaacttatatgcagagtacatcatgagaaacgctggactggaagaaacacaagctggaatcaagactgccgggagaaatatcaataacctccgatatgcagatgacaccacccttatggcagaaagtgaagaggagccaaaaagcctcttgatgaaagtgaaagaggagagtgaaaaagttggcttaaagctcaacattcagaaaatgaagatcatggcatccagtcccatcacttcatgggaaatagatggggaaacagtggaaacagtgtcagactgtatttttttgggctccaaaatcactgcagatggtgactgcagccatgaaattaaaagacccttactccttggaagaaaagttatgaccaacctagatagtatattcaagagcagagatattactttgccgactaaggtctgtctagtcaaggctatggtttttcctgtggttatgtatggatgtgagagttgggactgtgaagaaggctgagtgccgaagaattgatgcatttgaactgtggtgttggagaagactcttgagggtcccttggactgcaaggagatccaaccagtccattctgaaggagatcagccctgggatttctttggaaggaatgatgctaaagctgaagctccagtactttggacacctcatgcaaagagctgactcactggaaaagactctgatactgggagagatcgggggcaggaggagaagggaacgaccgaggatgagatggctggatggcatcacggactcaatggacgtgagtctgagtgaactccgggagatggtgatggacagtgtggcctggcgtgctgcgattcatggggtcgcaaagagtcggacatgactgagtgactgaactgaactgaactgaactgaacaggataagagaagatatttgcaaatgatgtatctgataaacagttaataccaaacatacaaaaaactcatacaactcaatatcaaacaaacaaaacaaaaaactagctgattaaaaaagaggctgagaactgaatatacatctttccaaagaagatatacaaatggccaacaatcacaagagaagatgcttaacaactctaatcattccctggaggagggcatggtaacccactccagtatttgtgcctggagaatatcatggacacaggagcctggagggctacagtccaaggggtctcaaagagaaatggctaatcatcagagaaatgcaaatcaaaaccataatgggatatcgcctcacacctgtttaatggttattatcgaaaagggaacaaataataagtgttggtgaggatgtagagaacaggtaacccttgtacactactggtagaaacctaaattggtgcaaccactatagaaaacaaattggagactcatcaaaaaattaaaaacagaaataccataaaatccagcaacttcacttctgggtatttatatgatgaaaatgaaaacactaatttgaaaaaatattatgtacccttgtgttcactgcagcattatttacagtaaccaagaatgaaagcaacctaggtgcccatcaatagatgaataaagatgtggtatacaggtattccaaatagggaaaggagtacgtcaaggctgtatattgtcaccctgcttatttaacttctatgcagagtacatcgtgagaaacgctggactggaagaaacacaagctggaatcaagattgccgggagaaatatcaataacctcagacatgcagatgacatcaaccttatgacagaaagcaaagaaagagactcttgatgaaagtgaaagaggagagtgaaaaagttggcttaaagctcaacattcagaaaacgaagatcatggcatccggtcccatcacttcatggcaaataaatggggaaacaggagaaacagtgacagactattttcctgggctccaaaatcactgtagagcgtgactgcagccatgaaattaaaagacgcttgttccttggaagaaaagttatgaccaaactaaacagcatattaaaaagcagagacattactttgccaacaaaggtccgtctagtcaaaaatgtggtttttccattagtcatgcatggatgtaagagttggactataaagaaagctgagcactgaagaactgacgcttttgaactgtggtgttagagaagactcttgagagtcccgtggactccaaggaggtccaaccagtccatcctaaaggaaatcagtcctaaatattcattggaagggctgatgctgaagctgaactccagtactttggccacctgatgtgaagaactgactcattggaaaagaccctgatgctgggaaagattgaaggcaggagaagggggtgacagagaatgagatggttggatggcatcactgacttgatggacatgagtttgagtaagctctgggagttggtaaaggacagtgaagcctggcatgctgcagtccatggggtcgcaaagtgtcagacacaactgagcaactagactgaactgaactgaactgacacaggtgtatgggcttccctggtagctcagctggtaaaagaacccacctgtaatacaggggaccccggttcgattcctggatggggaagatcccctggagaagtgataggctacccaattcagtatatttggacttccctggtggctcagatggtaaagaatctgcctgctggagaatccccttggatagaggagtctggcgagctacagtccatggggtcacaaagagtcagacatgactgagcaactaagcatagcacagaacatataagtatatatatatatatatatatatatacacacaatggaatattatttggtggtagtttagtcactaagttgtgtccaactcttgcaaccccatggactgtagcctcccaggttcttctgtccatgggattctccatgcaagaatactggagtgggttgccatttccttctccaggggatcttcctgacccagaaatcaaacccgggtctcctatattgcaggcagattctttaccgactgagctatgagggataacccattccctatgaggggatattatttggccataaagaaaaaagaaatcttaccatttgtgacaacaagtatggatgtagagaatattatgctaaatgaagtagatcagacaaagaaagcaaatattatatgatttcacttataaatctaaaaaacaaaacaaatgaacaaatgtaacaaaacagaaacaatcatagacagagaacaaacagaagggagggtgtgggtaaagagagaaacaggcgaggaagattaagattaaacttcgagttacaaaatacatgagttatgggtatgaaatgtacagtgtggggtatacagccaataattatgtaatatctttgtatggaaacaaaaggtaactagatttactgtggtgatcattctgagatgtacagaaatactgaatcactatactgtgtaccagaaactaaccaagtcttgcaggtcaattatacttcaaagacaaacaaactcatagaaaaaagatcacatttgtagttactaaaggcagggacggtgggagggggaactggatgaaggcagacaaaaggtacaaacttccagttataagataaataagcactagggatgtaacacacaatatgatgaatataattaacactgctgtatgttatacatgaaagttgttaagagagtaaattcaagagttctcattacaaggaaaagaattgtcttcagtttcttttattttgtatccaaatgaaatgatggatgttaactaaacttattgaggtcatcatttcatgatgtatgtaagtcaaatcactatgctgtatgtgtaaacttgtacagagcaatatgtcaatcatatctcaataaaactggtaagaaaaaaatgtctatagcttctaatattttacttacacaagtaaggaaagatggcactgatttttaaaatgaagaaactgagaaacaaattcagagaaaaacttaatgattttcaagatatgccccctctgagacaggcaatttgtagtgtatgcaaaactttgcagtcaaactgttacgctccatttaatgttaaactttaaactaagttctggaaaatatctctgaggcagaattttgtgctcaatagaaacagtttaaaataaaaaagaggtcctatatactttaaatgctggaggaaataccaaaaacaatatttaagaaaacagagattatcattctttttacttatatcattatcccttctaaaagttctaagtaactgagtacctatgtttgggaactattcttgtgctacaaattacccagaaataaaaacaactttatgcaaattggacaaagaaaatcagttcagggccaacatagttatgaatatgatgacagaaaaatacttcgttaatccctgggggggaatataagcaagaagacaacaaagacaacgacaaaaccacaggcagcttatgatattaaacagaatgttaaccaaacaaagcacacagttactggataagccaaactttaataagtcttcaagcctcatccagcttccacagaggagcctttcagtcagtcccaagcctcatctaattttaaaggaggaaaggaacaagcgtgtaatacagacactagctttcattctctttctttctcactccctttttttaagaggagggagggtagcaggtgcctttcagatatcaaactcagggtctatcaggagtatatactgtaatgcacacagggccatacagtaaaaataaataaaaatgggctaaataaaaaagatcgcagagatatgacaaatattaaatcctatctaatgtcacattcaaaggaagtatcttaacagctgctaagtcgcttcagtcacgtctgactctgtgcaaccccatagacggcagcccaccaggctcccccgtccctgggattctccaggcaagaacactggactgggttgccatttccttctccaatgcatgaaatgaaagtaaaagtgaagttactcagtcgtgtctgactcttagtgaccccatggactgcagcctaccagggtcctccgcccatgggattttccaggcaagagtactggagtggggtgccattgccttctccgatcttaacagcagccagagggaaaagacagattaactgtaaagaaacaacatctaaattgacagaaaacatcttactagcaacaatgagagtcaggaagtagtaaagtaataccttcaaactactaagggaaagtaaaggtcaacctaaaatagaagatccatgtaaaccgcctcacaaaaaataagaataaagttattttaagacaagaaataaaacacaaagcttgtaaactcatatcaaactaactctcactaaaggaattattaaaagatgtatggggcatggaaactcaagagggaggtgatatacatatagttatgactgactcacattgttgtttggcagaaataacacaacattgtaaagcaattatcctccaattaaaaaaaaaagatgtatctgaagaaagaagaaaataaaaatggaagagaggtctaagctgcaagaaagaacagtgagcaagacaaacagtacacatgagaaaatctgaaaataacattgtccaaataaaacaatagtactactgatatctaatttggagagttaaaaagaaaagcaagaaataagataatagacaacttattgggaaatgggtgtttataaaaacagtattttaacttctaatttcaaatttttttgccaagatatcataataaagtgtttcacatatggcttacattaaaataggaaatcagattttccgatggttgatcacttgctgaatttaagatcatcattaattgttggatagtattcataacagtcctataaaaaaatatgaagaaatgttacgaagtgaagtaacaaaaagaacaaatgacttgcatctatgtcataagttacacttatcttcaatctcattgtctcttgttaatctttaagaaggtctctgaaataagactttacaaatcccttagtgtactgttgtttataaggaattaacattttaattagatctttaagaactgatatgttcataatatgcttataattaaaaaacatatgcttacttactaataaaactataaatcaataaaacaattgataaaagtaatgacattgttttaaggacaaaagggcatcaaaatggtaatattttaagcaaacattattacaattaaatattaaaactagtcaaataaagactaagatatttaataacaagtaaagaaccaagtgactctcttttacagagatcttcaagatgaaggcatacctgattttagaagtcatcattactaaaatgtaaatgtaggtcaatctcttgtaattttgtgtgtattggggggtacatggtaaatattaataatccaattttggagtagaagtacattgctactccgtatgcaccgtttaaagatgcaaaaagctggtgaatgtttatggctgaaaggttccttaaacattatttaataatccatgtttggttttcagccaagcctctcgaaactgacagctacaattcctcgacttttaaacatactgcttctatgacatgttgtactaattccttaagccacaatgactaaagtcgtaagtgaccaactgctaaaaccaaaagatctttcttgttcggtctgatacttggttttcttgagacatgtcacactctaaaacacttgctcttttctgaaactccctccctcccttggcttctttggctccactctctggcctccccagtcacacctctcattctttttaatctaacttctatctagaccttaaattccagcactctcagtgttcagtccttagtcatccatccttgctattataaccctcacttcagaaaacctcatctgtttttctggttttaactctccctgatgactcccaaatctattatgtaagatccttatatcctactacttattacattatcttcttcatgtcccataaatttattaagaataaaattctaaatttgaattcatcaactgtttatcaaatctcttcttgttctttcattcccactacctatcttttggtttagatcttcagcatctctcaagtgaattactgcaatgcaggattttgacagggattttgactcactatgtctatggcagcaggatcaaggcataccgtactttggggaaaaaaaaactcctcagcttatctaatttgcacccatggttaagaaccagattgataggtctctatttctcaccacaccccaccctcctcagtccctctcttcacagttgactatcatgtaaattttcaaaaccaagtctgattttatcctacccctgcttaacccatgtatagcaacagactatatcgtgcacaagcagaagtccaaacttctgagtttggaataataataaggcccttcatgacctagtacccaccctcctcctctgccatttcatcttcccatttagtctgtcagtacaaagttgcttacagttcccctgacacattgggctgtttcatatgtctgttcctctgcacgtgctgttggtcttctgtgacacaaacttacacgtttcaaaattcagttcaaacatcacttcataaagtcccttctgtgccaagtctaagtctattactgcattcaaacaagaatgcatttttatacgtgtatgtagtcatttgaaaaaaattaatgattggtaactctgtatcaagtattatcttaggtcctaattatttaatttaatggggaacaaaaaagtcatggtccattgcagtataaacttaaaggttattatgggtattgacagaaacaagtaaatacacagattaattcataattataaattgtgatacatactatgaagggaagaatgggatgctgtgaaaaacaataatttcagagagaaagacatctgcattatatatttgtatatacacgtaacaggtatatattgagtgctctttgtgtgccagatgtactgctaattgccaacgatatgattattaaacataggtctgtctgcccttaaggagtataacctagaatgagaaggtgttccattttagtaaataaaaaagagaaaagtgttatcatttgctctgtatatatcccagaaggactagaacagtttttaatgtcttttcctcacaaatgattaaacctgaagcactataaagtactgattaaataattttaatgaaaatcaaaagtaagaaaagtcatacctaactggagtctgtggaagaatcatattcacctcttcatcagggttactttttcgtggtgttctttgcatttcaaaactaaatagtgataagcaaagtaattcagactcaaaatttacaacttgggcttcatgagtcaaaaaagcagtataatatctttctgttgcctcatgacatcatacaaaatggttaagtaaataacagaagttaaaggaaatagatgatccaaaagctgcttacacaaataaaatttattttttttcatcatctttttaaagttaagtttctttccactaggtttacaaacaggtgtgcaatcattaagaatttttctgaaagtgaaagttagatgcttgttttctctagaatgttacgttgatgatatcactagccaagttgttcagtattaaaaaaatcagcgctcaagtttttcaatcattatggtttccaaaatttactttcacttaaataaaatcagaaacactttacctgtgtttaattttccaaattatatatacatatatgtattttagctaatattaaacgatttcatgcttaatgacataaaattaatcatacaatcattcaaaatttttgtacaagcatatctcattttactgcactttgctttactgtgattcgcagaattggttttttaaaacattgaaggcttgtaatcctgcattgtcagatgacagttaccatttttagcaatacggtgttcttaaattaagatatgtacatcatttttttggatataaatctattgcacatttaatagactatagtacaatgtaagtgtaactcttacatgcactgggaaactaaaaatatttgtgtgacttgctttattatgatatttgctttattgcaatgatgtagaatggaacccataagatctcataggtttgtctgcagttatcttaaccattcctattttaggattctatacaacaatttaagagaatatgctttggtattattacattttaaaaaatgaaccagcatatcaacaaataataatacatcatgtgtaatacctgtctgcaggatcagcctgaagagttttatcatgatccagaaataatcttgcatctagatctttgtttttaaggtaaatttcttcatattgtttagagagattttccacctcaaaaaccaaaaaatattgatgattatccttttcatgccattatatctcagtatacatatttaaacaatttttgtacctaggatatcacctagttctacattacatagacttcacatgcaatataaacaaaggcatatatctaaaagtgaagtattttagtgcaaaaattgcatactttcttcaactgtaattttaaatcttgttttatggatatatcccaaactttatctaaacaagaatcaccaatgctacaaaacaatactgagatggaaatgtagataaaaatagatataaaaccacttaattgccaagatccaccattctatacatctttcacttttaatcttctactctacttaccaatataaaataatttttcaaaaactaacaaatcttgcctatcttttctaaatcctttggttactcacactttctttagtaacatatcttgggcatataatctcaattaattagcttaattaacatacttgcacaatttatctccaatgtcagacagttttccaaatgctagaatcaattattcttttatcagccctgggttcctaattttccaatcataatataaaaccaatgccttgtagacagttatttaacatgccttctcctgtgactttctaatctgagagcgctaaaaaccaatgcctgatagacaattatttcacatgacttctcctgtgactttctaatctgagagcgctaaaatcacattctaaaaggagtagtaggaagaaattcatttaaatgtaaactttgtgcttgcctgcataagttttttaggcaaagcaggcataactatttgtttactcattgttcctgccctgtattagtgaggcactaaatatcaacaggttattgactagtagctgttagtgctacataatgtaaagtgtatcttgaattttctaaccttgtgatcctttcaaagggaaaaaaattacaaatgcctaagattctttagagttgtaaataccttattttttgatatgtaagttggtgacaggactcagtaatacatcatccggctccttctggcttctttagtgccatgtcttaccagtccctgctctgtatcccaaccttaaggagttagttggagttcactgaacagacgatactatcacatatcactgtgcccttgaatctataatttccaactcctggaaatgctacttctcataaatcctactccactcagaaatcacatcatctccaaagaattttgtgcaaaatctacctggcccgatttgaattaggtacccctcctctgagatgtcaccacaccctgtgtacacatctattaaactcttgtagactcctactagtaatgttctatgtacatctgtctcttccactagcatcataaggacaaggactgtgagttaaatctctacaatgacgacatgtagcacgatgcctggcacatgttaagcactcactgagtaactgctgaataagtaagttaattcagggactagctaccaactcaggtcacagaatcagcaatctagctctctgatttcatgtcttttggacttggtgactgatgctcagtcagttcagttcagtcattcagtcgtgtccgactctttgcaaccccatgaatcgcagcacgccaggcctcccagtccatcaccaactcctggagttcattcaaactcacgtccattgagtcggtgatgccatccagccatctcatcctctgtcatccccttctcctcctggccccaatcccttccagcatcagagtcttttccaatgagtcaactcttccaatgacgtggccaaagtactggagtttcagcttcagcatcattccttccaaagaaatcccagggctgatctccttcagaatggactggttggatctccttgcagtccaagggactctcaagagtcttctccaacaccacaggtcaaaagcatcaattcttcagcgctcagctttcttcacagtccaaccctcacatccatacatgactactggaaaaaccatagccttgactagctagacctttgttggcaaagtaatgtctctgctttgtaatatgctatctaggttactcataactttccttccaaggagtaagcttcttttaatttcatggctgtagtcaccatctgcagtgattttggagcccaaaaaaataaagtttctgacactgtttccactgcttccccatctacttcccatgaagtgatgggaccagatgccatgatcttcgttttctgaatgttgagctttaagccaactttttcactctcctctttcactttcatcaagaagctttttagttcctcttcactttctgccataagggtggtgtcatctgcatatctgaggttattgatatttctcccggtaatctggacctccctgctggctcagacggtaaagcgtctgtctacaatgcgggagaccgggttcgattcctgggtcaggatgatcccctggagaaggaaatggcaatccactccagtactattgcctggaaaatcccatggacagaggagcctgttaggctacagtccatggggtcgcaaagagtcggacatgactgagcgacttcacttcacttcactttaatcttgactccagcttatgcttcttccagcccagcgtttctcatgatacactcagcaaatctggaaaactcagcagtggccacaggactggaaaaggtcagttttcattccaatcccaaagaaaggcaatgccaaagaatgctcaaactactgcacaattgcactcatctcacatgctagtaaagtaacgctcaaaattctccaagccaggcttcagcaatacgtgaaccatgaacttcctgatgttcaagctggttttagaaaaggcagaggaaccagggatcaaattgccaacatccgctggatcatgcaaaaagcaagagagttccagaaaaacatctatttctgctttattgactattccaaagcctttgactatgtggatcacaatcaactgtggaaaattctgaaagagatgggaataccagaccacctgacctgcctcttgagaaacctatctgcaggtgactgatgctaggtgtgtctaaaacactgcttcaccattgagaacttgctcttcatcatttaggcatccttttccccacaagttaccacataaagttctcagctgttctgttctcactgaagagcaagacatttgaggcaaaatgtgaaaagaaatagatggatggcatatcagtaagttaaaacatgtctacaatataatcacagtcatttcaaccaaagctatttccaattaagtagccaaaagagaaaattccctggcagtccagtagttaagccttggtactttcaccactggggcccagatctgatccctagttggggaactaagatcctgcaagctgcatggtacagacaagaagaaaaaaaaaatactcaaaaggatgttccaaaagtcagtaatgccaataatgttgatggcattaatcaaggcttctatgcttaaagaagcataataaagaaaatcagaataaattagattgcagaaatttaaatatttaaggcatttagaagttcaaaagcctatattttgatttttgaaaaatttcagtacaaatcaatgtctagtgcaaatgttatttatatatacatttgagcatatattacaaagggtttttctgttactatataaaattgattcaccacaattctacttagattctttccttgagtgaaaaatatttaatatatagtaaagtaatatgaaatttagacaactcttcttccctccccaaaatcctgaaacatattaactttttattacattttcgttcagattacctctggaagtccattagaagctacaattccaagagaattcataaaaggtataaaatttttgaaataaacatttttcacctgaaaaagataaagttacaacatgaccattgaaattaaaaaaaactggttttttaactgctcttgactggttttttgactgttgctattaataccagaatgagtgaactgacattttgatcaataagttacattcaactcagtgtgatgtttatttatgattaatacaattattcactttaaatttatgtgaggcagatttcaggtcctaaaatggaggtgcaggggccagttgttaatgaaatgagatttacaagaagaaaattcattgaaaccaatttcaaaatcccgtatttaacaagtggtgaaaagatcagagggtcaaaaaaattaagcaacctgagcaaagttacatagctaggaagcgacagagctggaattgaaacccaatctgcctagcatcaaagccaaggctctttaacttctctgcactgcctctgatttctccccagagagtatttttgggccatttcatacacatattataaaacttaatgtatactgagtcaattattttagcacaaatttaggaaaaggatcagcttttataagaaaataatttcacatacatatacctgatccacacttaggatgacaatttacaaagcatagaagagatgctcagaccctgttgtcagctacgccatgggaagaaagcagtcactgctcacacttctctaaagaagtttctcacaaagaaacaaaacattgcatttctctacactttaaattacagtgtgctaagtaaatattggagaaggcaatggcaccccactccagtactcttgcctggaaaatcccatggacggaggagcctggtaggctgcagtccatggggtcgctaagagtcagacacgactgagcgacttcactttcacgcattggagaaggaaatggcaccccactccagtgttcttgcctggagaatcccagggacgggggagcctggtgggctgccgtctatggggtcgcacagagtcggacacgactgaagcgacttagcagcagcagcatacctaacaaaactcttcaaaactgaatgaaaacgctttgtttgggacttacgcagtttcatacaaaccgcccccctacatttaacatggataataaagaccatatttggaaaacctggaattatatctgactattctatactgacaaactgtcatagaattgtaagcaacttacttttcttcatataacttccttttccaactttggagtctacatttgttaaggtagaaataatttaatatatgcctattaataagttcctattttctacttcacaaataagctataagaattaaacttctataatacttagtattgttttccaattaattcccacttaactggaataattataagatgggtagttctatctaaccaattagtatgactaaccaataatgatatgaccataaatataactaagcaacagttatataatcttaaatgctatatgcaaataatattacatattttaatatataaagtatcaaattaattaatataaattaccaaagctattgatcacctacactttataagtcactgttacatcataaattatgaaagaattatttaaaaggaaaacatgatttattcctgatttttggcaagcaattatataaggagttctgaaatccagagatttaaccaccaggaattagaaagctgcctttatttatgttctttatcttaaaggactaagcagcagactagagttaaaaagaaaaaatttcaactacatttgtcaccttattagtggagataatatgttattctagaaaagtaaaagagtatatgtgtaaagttgatacatctacatgtctatatctatatatttgatgaaattaacaaaactcatagtgccaaaattcagacttgataaatcattccaatacttattaaactagattttgatatcatacccccattctttcccagagttgacagagaaatttcaaagatgcaacatttcatacagtgaattgtggacaatataacaatctatgagagaaagagcgtggcacagtgaaagcagcactggtagcagatgttcagaagcacaccacactttgttagtaatcagctatcagtctctagaagcttgtctgctcattagtaaaaggaggccaagtacattaattctaagattccttccagttctaacattccagattttattaacaagataagcaattcctgggtgttcaatgtatcctctaccagtcattaacatctggtgtgatacttagaaacagagtaattatataagactgaacagaaatttgggcttccctggtggctagcaataaagaatctgcctgccagtgcaggagacacaggtttgatccctaagttgggaagatccctgaagaagggaatggcaacccactccagtattcttgcctggagaatcccatggacagaggagcctagtgggctacagtccacagggttgcaaagagttggatacaacttagcgacttaacaacaaacagaaacttaatcttggtatcacttatcactaaaatcaagacaatagggttttcttagtagcttactctaaaacatcaggagtatcaataaccacagaagaattaaagaacaaatatatttgaaaactactgccttaatcatgtacatttcagtgattccagaataagggagctattctctttaaaatcaaagtaactgaatatgaaaattaaactttttctaaatattttgctactgcaaaagagttggcactaattacaaaaaagcaagctcatcatgaaataattatatattgttaggaagaacttacatctaaatctactgtaactattttaaagaaatcatgaagttaaattacctcatctatattacattcatgttctttacagagaacttcaataattcttgtatcattttctagttgttttgctatccgtgcactcctgttctgacctcgccttggtgttcgaggtgaaccattaataggtattacagctgtttctgtaaaaatggtaaattagataagaacaattgcatattccactgtataaaataatgaagtattctaattataacttggaaggttggaaataatcttggtaacattctgctacttttacttattaggcttcatgaaaaagctaacagcttcatctatttactgaatatctattgtaaattatatactggtaatagtttttgccatccctattctcttctgcccccagctggtccaaaaagaaacctaaaactccatagacaaatatgaaaaaggcaagggaaatagccaacttataaactaattttaagtgtattctactcagttggtaaggcgggaaaaatgtttcctatcttaaaagaatcttaagaatgttaagcattatttatggattcactttcaaggtaaagtataaaaataagttttaaaaattttagcaaatgccatataaattatgatgattaaaaaaaataagcatacaaatataataatgtgacactaaattgtgattttagaaaaaaatcccctggattaatttgagcattttcaattcaaactgaatgtggattaagctattaaagagattatagatgactaagtataaaaaatattaactgcctctaggcccaaaaagaaactgagaggatagaggaacatgttagactataccataggatgcaatcagtaaaaattaaaccatggaaaagtcaacagaaaagaccacctgattatttaataaataaattacaagaaaaaaaagagaaagatagatggaggaggaatattttaagtcttaaagtcgtatcaatcaatcataaagtatagatgttatttagattctgatttagtcaacctataaacatttttaattacttttataaaacaattgaaaacataggcacctactagatatttggtggaattaaggaatcactatattaactggtttttaggtatgagaatggtattgtcattatgcttttcaaaaagactttatctttcagggatatatactgaaatttataaggatgaaatggtatgcaaaaatgtgcttcaaaataatattgctggtagaactgggcagtagacaggactatgagttgatcaaaagttatacactgagggcaggtgataaatacatgggggcttattatatgatttaattatgttcacagaaattcttcttaataaaaagctaattaaaagtttaccatagacatcagttcgataccttatccttgtttctcctttaacatggcacttgaagaattaactgaatatctgaattatctgaatatctgaattatccaaaagcacaaaagttgccaacctaaaattacactcttcatcaacttattacagttataacatattttaaaagtgaggaaaaggcatataaaggaaatttttaaagattcgggaagtttttgaatatattgttttgtatttttttcattttgcatgtggtttctgctaaatgacctgccttttctgtcaaatcatgtacaacacattttcaaaattctgctccagacttcatttttctatgaagttattgctcatgtagattaagtaggcttcagcttttcagtcacttcgacaatactttgagacttacatgttttgatctgtcctctattatttttagtattattaatattttatcattttaggagcaaggaatcagttaagcctaagttaagttcacatttttctgtagtataacaagtgtttttttaaatcctactctatatgccaccaaaagaagcaatttcattctaagaggagtatacttatttttgcttaatgctatctaattattccagtaatagttattatttaactacactttccatctcattaccctctgaagtggatcaattacagttcacatgccagaaaacaaaaatcagtcacataatcattatggcatccaataaaaaaatgtagttaatctgttcctgtaggatgggccaccctttcccatacagtttagttcatgtctgttccttgcctattgatttttcctttactgggtatgccctccctgaacttaccacaaccctcaaaccccaactaccacttcaacactcagctcaaatgccaccacttcaaatggtcttccttggtctttctcagctgggaaaactttctcatctcctaaactcccatagtatttgctgtattttggcccagaccactttcaaccatatactctaaaaacctgcttacttgtctaatctcttcttccatatcttatgctacttaagagcagaggctatgtctgacttcttttttattattcctttggctctagaactatgttttggatctaggagaagtcaataaacaactttgaatgatgaagtaggaggggtataaattaaaatactcactatatggttctttgagcaatgcaggaggtgagagtttgataaaatagtcaaggacacacagcattaattgaaatgagatcaccagatcatcttccatttgtaatacttgtcctgaaaacaaaaatggtccacattttaaggtagagattgagatattaagtcaggaaaaattgtggacatgagtgtatccatatactcatgattgaacaatcactaggagcatgtcaaaaatcattttctatatccctaggtatggtgcaaaaatttgtttataatacacttagaagttgttaagaaatgccacagaggtaaagaatatgaagaaaatagtagagtgaggtcagatcaaaaaatctctcttccaatacctaacaaaatgaaaagaaaaatatgtactggttaagttccaataacaatactaaatttgagagataatgactcagagcatccttatctttcccctctttttactttacttttcactgatgagagaggggaaaatggaggaagtaaacagctacatcaactctgacaaacacaaagactccagtataatatgctgaattaggggacaatctgaatcctaacatactccttttatgcaaacaggacaagtacctgttttacaggtcattctaacaaaaacctcagaacaatgactcatatcattccagataaggtcctgactttctccctcatcctttaaaagtaagtataattttttaaaaaaagactgctttcatacaatagctctttggagaacacaacaagtcacagataaagtacaaagtgagtgaagggaaatgcattcacactacatcaaagaaaacagaacatcaggtcagagaggcccaaataaagtcctagcaacaaggtggatggaaagagagtgggaagcacagtagttatgcaaacatattagagaaaataaaaaagaaaattaaaaaacagaatcacgatataagaagggggaaaactgggtagagaaccccatcttgaagatagaaagaaagaagaaaatgtcctgagtccttgcactgagaactcaaaagaacacgaattacataaaacaaggagctagacaaggtaaggaaaaactcaaggccaagtaacaattacaaacatagtttagctcaaaacagaagtaaagtttgaaataaaaatagttagtacataagaaaaagaccaaaggttaaaataacattacagaagacaataaatagggcggacaaaatcaatctaaggtaagacagtggatgttctcaaaatgtaacagaataatatcttaaaatgtagcatgctaagatttctctgaaatgaagagcagaatcttcaggacatgattcataaacaggccaaacagaaaacatggcaccaaaaagcttttttgaaaaactccatggtaaaatctagacagctaaggatagatcaaaataaagaactcagaaatggagaagctatgatataggagtgacaaaaagctaagaattcatttaaacacgtaaatgagataaaactaatgtgataactataattacagaacagaatataaccttggataatgcaatgatgataaaaaaaaataagcaaagcagaaaggaggaaacaggaatgtgacatggagaggattctttttcttcagagcagactaatatatattgctttaacttataacacaaagttatataaaagagattccaacctcttaaatgttttcataatgcttgagaaatattttagaaaataatattgcttaagtgataagacattcagataaatttaagcaattccttccttttctgtttattttcttctataaaatttgagtaaaattaatttttacattttaaataacacaataatatgatcttatttttagaaaattatatctccttgtgaatgcactcatccactcatctattttaatcagcatgtcatttcagatgtattttgtgcatacacataattttgattattattttaggtgggttcagggtaatttttctaattttctttgcatttcactgtattactgaattctttatcatgagtatacatcatttttataaaaacagtaacattattcttaaaaataggaaagtaggaaagaatgaaaaaatattagaaaaagaagtgaaatgagacattttcaaggttgcttccagtaccagaattatgaatttgctaacagttaaaaaatcacaagaattggaggtaaggaagagcaacattgaactgaattaaaattttgagcttactcaaaagaaggatcaattattacatttgaaacattagcatgtaacaatgactttacctttagctaataaaaatgtgatccaagaaacttttagcaccaacatagaatttatttcagtggatatcctagtaaacagaaaaaaaaattagttttccaaatatacctttttccccatgttgtacaattacagactacagttgactgcataatagaatacagtccattttaaatgcacaatttacacatgaattcaattttgtctcaatttagtttgtgtttttaccaagttatttatattttcccacagagtagtataccttttctaaagaaaatactgaataccttctattgtaatctaaaaatacacccaggaagtggtaataatatgacatacttggtttccaattaattcttttctgctgttttctaattaaaatcaattttatgtgagcagaaaatacacaggtttgggtgagtccagtttaccagtttaacaccatgccctcataaactttaggacttccctggtggctcagacggtaaagcatctgtctacaatgcaggagaccggggttcgatccctgggtggggaagatcccctggagaaggaaatggcaatccactccagtactattgcctgcaaaatcccatggacagaggaggctggtaggctacagtccgtggggtcgcaaagagtcggacacgactgagcgacttcactttctttctttcctcataaactttaaatcgttcacttgttggagttaacaagtggaattagattaatagagttaattaataaatatacaatttctctttgtatcaattgtcttcagtatcattatttctgcggggcagaaaatctcatgtattactcattatgtttttttcagttttttctgaaacaaaacaaaacaaaactgtagagctcttacaatggtatactgctagaatatatatcatatatttaaaaagactatttggaaatttaaatatagacattcatgtttattcttacacaaaaattatgctttaagtcttagttaataaaatgtctgtaatacactctcaataaagattctgtcaatgaattagcattttttcagagttggtaaaaaaaaaactgctctgaatcaacttctccctttagtttccaattagttctcccttacagtaaaaggcaagtatctcataccactttctttgtgaaaagataaataatctgcacagggcttaaatctatgaccttaatttatgaagtagtgtgacataagcaatcaaatcaaccctgaaattaccaatgtgtttgggattatttcatatattaaaaaacccaaaaagtgaaaaagaacatgctctgaggtacttacgaactgctgggttgtgtcaaatatataagctcacatgtcctaaaaggaagaaataattatgttaacatcatggcttttttaaaagttacttttaacattttttcataatttagaagtcaattttataatgctttattcatcctattttaataaggatacattttttaagtacagcattataaaacaaagtagatgtttccaatttatgacatttcatacatccctataatatctacttacaaaacaactggactccatgtgtgcatttgtaacttggaatacattctgtaattgaatcttgatctggttacaatctcacaccagctcataaaagcttatttaataaagttttgctgaaataacacaactgaaaagtactacttaacggaaacctacttatttagggcagtgacttctggaatggtgggtagagtaaggatctttacagacctgttccctaaaataataactataattggttaaaaaaaaaaaaactatttctgaaaaaccatttaaagtctctggaaatttttctaagggcatacaacaaaaaagggaacatatcttcaagaaaatctaacaaatcttgatgagaacaatgagtctgaggaattcaatgcaaaactcatttcttccttcctctccagttcagcataaggaagctctatgcctgacaggtgaagccaagacacagggctcctctctctccagctctcaacctggagctctctctggggagagcaggctatcagtgcttctcatctcccacaggtgtatgttgcagaaggtctagcccaggtaagaggagctgagcggcatggggctcctgtcctccacttcacaaccactcatagggtaaagttttattccaggcacacaacacatcaaaatactgatttgtcttgtctcagctggctcccgggacagaggttccagccaagagaggcaatctgggaagaatagggctactgtctctcctcagtgccctgctcttaaagcagaggtgtcgctgcaagagacaaggccactgtcagcttgctctcccaaccagcggcacagaagtggcagcctggggagaagccggtgtcaagaacacagagccttgggctctccctaggggaattaacttcactcaggatggggtgggggtgttcaagaataacagcacggttgaaggcaacatagattttggtaaaagccgataaaagagaaaaccaacagatcttatgagagcaaaaagctaaatcctagatcattgagaggagaaccagggaaagaaacagctacgaataactctcctgacatcaaagactactcctgcaaagggagccaaatttaattggattaaactgtgaagcaatttgtgactcagagcttgtcaaaaacaagaaagtaatcagcaataaatgagaggtaacaattaagtgtgatattaacagaggcagttagcttaacaacagggggaaagatggttaaagagaaaaaaatcgctgtcagctcagtgactgtgcacctgtccaaggctacactgaggatcaaatcagaggtaacatactgggagaaaagacttcactgaaatagtgccttccatgtcatggatatgcctttcctggacatatcatataataaaagtatgtggccttttgtatctggcatctttcgcttagcttaatgttttcaaggttcatccacactgtagtatacatcagtactttattcccttatacggctgaatagtattctaccatatggatgtgtgtgtcagttgctcagttgtgtctgactctttgcaacgccaaggactgtagcctgccaggctcctccaggcaagagtactggagtgaattgccatttccttctccaggagatcttcccagcccaaggatcaaacccaggtctcctacattgcaggcagattctttaccacctgagccgccagggaagccctctaaccgtatggatagttcacattttgtttaccctttcgtcagctgatggatatttggggtgtttccattttttggctaatacaaataacacagccataaacacctgtacacaagttatggatggatgatacatgtcaaaatttgatgttttgggatatatgagttaaataaaacactaaaattaatttcacttgtttatacttgtcatgcagctactatttaaaatatacggcttgcatttttatatttctatgtaacagcactaatatagttagtaatagctttaaaagctactgtttattaagcatttagaatgtgataggagatgaagtaaccagtaatactgtcttacttaattgttacaattactctgcaaggagagcattattagctctatcttacagattgaaattgaggtttaaagatgttaagtatctttctctagcttacaaagtcagtaaatgataaaattaatattcatatctagatctgtttagctttttaaaacttatcctaatcactacagcacactgccatatacatacatatagtgaacccagaaataaacaggctttggcaggcctgtttatttctccatgtgtccatgagtcagacacaactgagtgactttcacttttggtatcacagctaattttcccaacagttcttcagaagaaggtacacataagataggaaaaaaaaaaatcctgattcacttcaagacaaataaacattaaattatctcataaactagtcaataagaattccaaatccctttaacaaaggcctgagtgatcttttacaggccaaatcagactctgtcacttgccagcttaaaatcaatgactccatcgccttctgggcaaagttcaatcaatctcatcccctcctaccttttagccattagcaatatccaaagtactttatggtactgctttggctttgtacacatgctgatcactctgcctaggatggtcagtcccagtctccacatattttgcttggtgagtttctaattatccttaactctactcagacattgccttcttctacagttttttcaccccataattattcttattaccttaaaaatacacagtattgttacccactacataatttctgcttcttacaaacaaccctctacaataggacatcaaacaattactgcatgtaattttattaaaatatataatctacttatttactgtaaacttcttgatgatcacagttatcatatgatttcatattatgagcatctaacacatagtggttaccaatagtcatttcattaatgcctgtgtagtttcttaacttatattcactaaaacagctgacagcctaaagtttcttaaagaatattccaccaaaaaaactactgcctctaaaccaccattaatatacaagtcataacttggcagtaaggtcaccactcagttcagttcaattcagttgctcagtcgtgtctgactcttcgtgaccccacggactgcagcatgccaggcctccctgtccatcaccaactcgtggagtttactcaaattcatgtccattgagttggtgatgccacccgatcatctcatcctctgtcatccctttctcctctcgccttcaatctctcccagcatcagggtcttttcaaatgagtcagctcttcacatcaggtggccaaagtactggagtttcagcttcagcatcagtccttccaatgaacacccaggactgatctcctttaggatggaatggttggatctccttgcagtccaagggaccatcaagagtcttctccaacaccacagttcaaaagcatcagttcttcggtgctcagctttcattacagtccaactctcacatccatacatgactactggaaaaaccagggccttgactagatggacctttgttggcaaagtaatgtctctgcttttgaatatgctgtctaggttggtcatagctttccttcaaaggagtaagcgtcttttaatttgatggctgcagtcaccatctgcagtgattttagagcccccaaaaataaagtctgctactatttccactgtttccccatctatttcccatgaagcgatgggaccagatgccatgatcttagttttctgaatgttgagctttaagccaacttcttcactctcctctttcactttcatcaagaggatctttagcgcttcttcgctttctgccataggggtggtgtcatctgcatatctgaggttattgatatttctcccagcaatcttgattccagtttgtgcttcatccagcccagcatttctcatgatgtactctgcatagaagttaaataagcagggtgacaatatacagcctgacgtactcctttcccaatttggaaccagtttgttgttccatgtccagttcttactgttgcttcctgacctgcatacagatttctcaagaggcaggtcaggtggtctggtatttccatctctttcagaattttccacagtttattgtgatccacatagtcaaaggctttggaatagtcaataaagcagaactaatagatgtttttctggaactctcttgctttttctatgatccagtggatgttggcaatttgatctctggttcctctgccttttctaaatctagcttgaacatctggaagttcgtggttcacgtattgttgagcctggcttggagaattttgagcattactttactagcgtgtgagatgagtgcaattgtgcggtagtttgagcattctttggcattgcctttctttgggattggaatgaaaactgaccttttccagtcctgaggccactgctgagttttccaaatttgctggcatattgagtgaagctctttcacagcatcatctttcaggagttgaaatagctcaactagaattccatcacctccactagctttgttcatagtgatgcttcctaaggcccacttgacttcacattccaggatgtctggctctagatgagtgatcacaccaccatgattatctgggttgtgaagatcttttttgtacagttctcctgtgtattcttgccatctcttcttaatatcttctgcttctgttaggtccataccatttctgtcctttattgagcccatcgttgcataaaatgttcccttggtatctctaattttcttgaagagatctctagtcattcccattctattgttttccgctatttctttgcactaatcactgaggaaggctttcttatctctccttgctattctttggaactctgcattcaaatgggtatatctttccttttctcctttgcttttcacttctcttcttttcacagctacttgtaaggcctcctcagacagccattttgcttttttgtatttctttttcttggggatggtcttgctccctgtctcctgtacagtgtcacgaacctccgtccatagcacatcagacattctatcagatctagtcccttaaatctatttctcacttccactgtataatcataagggatttgatttaggtcatacctgaatggtccagtggttttccctactttcttcaatttaagtctacatttggcaataaggaattcacgatttgagccacagtcagctcctggtcttgtttttgctgactgtatagagcttctccatctttggctgcagagaatataatcaatttgattttagtgttggccatctggtgatgtccatgtatagagtcttctcttgtgttgttggaagagggtgtttgctatgaccagtgcattctcttggcaggactctattagtctttgccctgcttcattctgtactccaaggccaaatttgcctgttcctccaggtgtttcttgacttcctacttttgcattccagtcccctctaatgaaaaggacaccttttttgggtgttagttctagaaggtcttgtaggtctccatagaaccgttcaacttcagactcttcagcattactggtcagggcatagacgtggattaccataataaggaatggtttgccttggaaacgaacagagatcaatgtgtcatttttgaaatggcatccaagtactgcatttcggactctttggttgactatgatggttgactctttggttgactactccatttcttccaagggattcttggcccacaggagtagatataatggtcatctgagttataaaacaaataattttggaagaaatattcagaatgtatatgactggacaaataagaaagtcaagactattaagggaacaaatctaaggtgcaatacatcacaactttactaagtatgtaacagttcccagatggaatctaatatgaacagtgacatgaaaaagcagggtgcaatcctaataaaatttttactttacctttctaatttgctgtagagtgcacacaacacattatacttcttcaacagtcttgacacggcattatcaactttggtgctagtatcaatttcttttagtaaatcaaagaatttatagacactgcaaaggaaagaatagaaaaaagtgaatccacaattttagaaatttattttttcattttcaaagcatagacatttcaattcaaaaggcctgttagctctgtaccaaatcactattataccctttggaaggaattagtttttgcattttactagaattcaaagggaaaaaaagaaatcaactagtcttcaacctatatccctgtatctatacacctaagccaagaacacagaaaaaataagggttattacagacatacaaatatttagttctgtatttagctgtatgttttaaaaaccctaagttcccatccatttatcctacacaaaaactacccgttttgttccaatgttttcctttacatattataactctcctttgacagtgagaaacctgggatccacctatctctaactcactcatttaatcaatccccctgtaacgaccaagctaccaactcctccaagttggcaccctcctctcctgctcggactgactcccccaccctgaactgccctcacccttccacataggtatctgaccactcatcccagatagctcttacctcacatgtgctgtgtctccctacatcagctctccacacacctgcttggtctgcccttgcacaccaagcagcccatgtcaagaagccccccacacccttgggggatgacctcctcatcccactttggctctaacacccttctcagggagccatggctctccctcaccatagatgcacacacctctctttaccccaccaatggttttaagggaaggaaaaaggaaatagctgggagctcagatggtaaagaatttgcctacaatgcaggagacctgggtttgattcctggattggaaagattccctggagaagggaatggcaatccactccagtgttcttacctgggaaatcccatggacagaggagcttggcaggctacagtccatggggtcacaaagagtagaacatgactgagtaactaacactaataatttttatttcacaggaaaggaaaggaacccgagacttaataaggataagcattctatttcaagtcctataccttgtaaaatatacccagtctatcttaacccaaatatagattctctttccaatccccttaagtcactaaaacatttgctgatgtaaaaatttacctctatattcagactgttttcagctatataaaacctattttggtttagtgatattatttaataaagttaaactttgaaatctctgagacataaacaagttctaatttaatcagttaaatatgtacacagaaggtctttgtttccacattttatctagaggtagtaataaaattactaaaatgcgaaataattttatctcatttacacaaaacaccaattatgtttaactctagatggctttacccaagaagaaacatactactatctttttggtaaattatttactattagatattgtaaatatactgcaaaagaaatgactagaagaaatgaccagaaggcttctcttcagttgttggaaacaattagtaaattctcattaggcttataaactcaatacagacattaagtaattacaggggcaagtattataatagatacttaactgaacacacagtctcaaaacatatacaattacaatatctattatattaaaagtcttaaactttaataaatcaattaaattccttgaagatgggctcacactacttttacaaagtttttaatatataataagcctatttaataaagctgcctattttgtccactttatcaacagctacaattaagaaagttaacacagtgagagatacaatgaagattttcccatgacacagactgctacattttaaagaaagtgcagcataaagacattaagggccccagcagagtgggagagttcactagttgacccaagttctccatgttttagttaattttggcatttcccaccaattccctgaggtctattaaaatgatagttcaggaatagttttttttttttttaatggcagaggcctatattaatgcaagaaattttacctggtttcaatatttttctgtagctcagtgaaagtgaacgacatctcatctaagtcaactgctgcagtaaagatacagattccccacagttcctttttcttttgaacataaccttcctgcaaacaaaacaaaaaggttcgagtaatttgttaaatcatttacacacaaaatactaggcaacttttttcttattgagcataacaaaataaatttgttcctaagtctttatgagaatatttaattctagactagtacaaactagttacaaaattaggaactcaattttatattgtaaagcaaaaaaaaattaccagataggtcaaaagttaaactacaactttctataagaaatctagaagccagtcagttctctgaggtaaacattttcagttctcaataacacatcatccaagccaaggtgaaagattttacttcataacataaattgtgtttaaaaaacaagcccagtttctcacttgattatcctccttttgctctaattcacttgttcttttaccaatctattgattcaagtattttttaaccttatgaaatttatatctctcagtgttctaactgccttccttgtaaaatggaaataataatacttacctcactttgtaagaattaaatgagactttatataaagcccttaccacaatgcctagcatttaatttgtactcaatgaatgacagctatcattatcattagaatattttttcatcattagaatacttattcccctaaaaatatatatttatttaaatatgtgttttataggtaaaattggattatattaaattgaaaacaaaagaaataacaaattatctaatgttctatcaaacagttggaactacttacttactcttaattgtagagtacaatggggctgaaaagtatatgatgcaattttatattgttttaaaatctcaattacataaaagttttaggaaaaagaattattctagattatcaaattttagggataatacaaagcttattactatccaactctaaacttttccttaatttaaaaaatcatatctttatcttcatacagttttatctcttccaatttgtttttttagtatcttctaaaatttgacgtatctaataatttagatcactgactcaatggacatgagtttgggtaaactccgggagttggtgatggacagagaggcctggcgtgctgtggttcatggggtcggacacaactgagtgactgaactgaactgaataatttttaaagaaatgatcattatgcaactaacacagttttgtcactttggggatacagtgatgaaaacagaacaaacaaaaaaattccctgtctccctgggagttacacttctatttaagttaaaaacatgaatttttgtgtcaaacattcaagactttgaacacatactctagttgtataactgtaagcaactgattcacagaaggcaacggcaacccactccagtactcttgcctggcaaatcccatggacggagaagcctggtaggctgcagtccatggggttgctaggagtcagacacgactgagcgacttcactttcactcttcactttcatgcattggagaaggaaatagcaacccactccagtgttcttgcctgaagaatcccagggacggggaagcctggtgggctgccatctctggggttgcacagagtcagatacgactgaagcgactcagcagcagcagcaagcaactgattaaatctaattaaacctcagttttttactaaaatagaaatgataatagtatcctatcagggtcaatatgaaatttaacagtgaggatggtcttaagtaatcagcacagtgcccggcattatactcattcagtaataaacagtggcagcactattatcagtgaatctagcactcattcctctacatcatatctgtctcagaaactgtccacaacccaatcttctccacaccaaaaatattcatccctgggaatgctgaggactactggagttttgtgtgtaagaaatcatttgtattgacttctagtccctggcaatcactgatctgatttcaattccttctctagaatgtcacagaaatggaattatataggctgtagccttttttgtctggcttctttcacttggcataatgcttctgagaagtcatccatattgttgtacctattagtatttatcccttttatttgttgagtagcactccactgtatgaatataccacactttgtttatctattccaatagctgaatacactgctatgaataaggctattaaccttgagccttaaatattcaactacagatctttaagtggatgcatattttcatttatctcgggtgaacgcctcactggggaatgctaaattctacattaaatgtaagtttaagtttgtaagaaactggtaaaccgttttcccaggtggctatactgctttgcagccccgccagctacaaatgagagttcccatttcttcacaccctcaccagcacttagtttctgtttgttttccagtcatcctagtaggtgtgtagccgtacattttcccaaggactactaacactgagtactttttcaaatctcacttagcatctggatctcttcttttgccaattttctattcagttgtttgtcttatcaagttgttaagagttacttaaacattctggattcaaattccttaacaggtatgtgttttgcaaaaatcttcaactgatctgtagctttgtattttcttaaatagcatatttcaaagggcataagtttttaattttgatggagctcaatttattattttgttttatagatcatgctcttgctggtactatccatgaaatctttgtttaatccaaggtcacaaagattttctccttggtcatcttctggaagtttatatctatgcttcatttgaattaatttttatgattggtgcaacatagggactaaagttcattttttgcatatggatgtcgaattgctccagtatcatttgttgaggggaactcctttctccattcaactaccttagcacctctgtgtgcaaacactgacccatatgtgtgaattctattttctgattctctgttctgttccactgacctagttgtctttctttccaccaataccacaatgacttgattactacagctatgttttcttctttttttagttcagtttgattcaagacttttaaatccgtaaaacgacatttgattcagttctcattgtgcagattaagaaattgaagattagagcgtggagacttgcccaacacagcctatcaatgccacaggcctataaaaccacagtttcctaacactcaaattagtcttccctttatttaagaatatttccttcctacatttctacattgattttctaacattttcattattgaaatccttaatctcaccaccccactacaagttttgtactcttcatttctattttgttgaggttagagaatcacaattccaaaggcttcagcatgtttctccatggtaatttctaattaccatatactcccaatgtccctgcatctagcttcaggtccctcttctcttccgactttgacaaatgaacatcctcctccactcttaaatcagtaaatctactccctcacttcttcccactttggatcacctccttcaagacctagtttattaattcctccctttgtcttacataatttatcttacagttctttctaaacacgtgcttctgtttagctacaaacaagcttgcactgtgctgtgctaggtcactcagttgtgtccgactctttgggatcccatggactgtagcccgccaggctcctctgtccatgggaattctccaagcaagaataccggagtgggttgccatgccctcctccaggggatcttcccaacccaggtcgctcctgcattgcaggcagattctttaccagccaagctacgagggaagccccacaaacaagcttacatcacttaaaaaaaaaaagctatccttctttccctggactttatcaagctactgttagaaccacacgaaccacacatacacacctctcactgttcacacacacacactcaccagatacactctcccagtacacacctactacatccactgaacacatacttctactatataagcactattctactgagactattgcctaagtctcgagagatctctctctaaactgaatagacttttctttggtttcatctacaaagacctctatacaacatctgacaccactgtaatgaaacttttctccttagcttttcaaacacaattaacatcctcattctcttttttatctctatcaacttcttctgagtttcctaattccaaagacttttccccaccaccttcttccttctgccgtctgcagcttcatccacttctacagcagccccaactcctcgatacagatgtttcacatgactcatcctgctttccggccctcactgatgtctcaagatctaggccctattttccaaaggcaattacaacccaaaatttgtaactgaattgtttcctcaaaaatttagttgagaattatgtaatggcgtcggaatagcacctttgaaaccattaaaacagaggaaaagcaagttttactcagccaaaagaatcacaaaaaaataaatgaaaaaaggaaaaaaatgaggaaaggataagaaaaagcaccttgcaaaagaaaaagacagtaatttccaataaacattttgaatataagaacctcagaagagtgttaattgaaggacattttgctaatctgcatcaagagccttaagagttcagttttatctttatgaatttatccaatgaaaataattagagtaagatttagtataataaatgttcaaagaattacaacagcaaaaatagtgggaaacatttaaatatctttaaatagaacagttaaataaattatgatagagctgtatcaggagctacataagactcttagaaaacatttcaaagattataaggacacaggaaaaaaaaacagacacattacaagaaaaaaaccatcagaatacaaaattctgtgtatattttgactccaatttgttgaatatttttaaaagaaaggataggcaaaaatatatcaaaatgttaactattatctctaggtggtaggattacaaatggttttcattaatcctaggtatattttctaaattacctacaattataaaatagaggggaaagcaagtcaattaaaaagtactaaatttatataaaacaggtgagaggaaaaattatgaatatttttgagaaaaatcttttttaaaatagtaaaactttaattacatacactatagtttaaatcaaaatctataatcaacacttaagagattactcatttaagctatcattcagtttagtttacttaaaccacccaactggtaaccctgagttagtgatatgacttctactgggttaaccaaaaagtttgttgtgtctttttccccatgatattttatggaaaatactgaacaaagtttctggccaatccaacacttgctcttttacgatgcactaacttataaaagagctcccccaagtggtaacataaatcatcttagaaacatctgaaaagtaggttatcttactgaaaagtaggttaacataactagcatgaatttaacctgaaattttaaaagttaaaaacactactctctcttatctttactttttaagatatcaaccatgaaaatgatggaaataagccatagtaaacacactctttatctcagggtcaaaaggatacatccttacaccagattcatgagactgtaatgagtgattagcaataaagttacaagttaaatgtattacagaagtagagaggctaagagctgcctttatatcttcccctcctggatttccttaccagggttatatgtaagaacaaaagaaataacatgctaatatgccagaaaatcctccctctcgcttgcataatatcagctgacagcactcaaaacctgagtgctaacgaaattcttgatgtgctcccaagaaccagaaggcaagagtagcacagccaagaagaatacaaaagctaacttcacttgtgctcgatcatatttttgattcaacatgcagaggtaaacaccaactgaattagccacccagttacacaatggctttgtggggaaagagttgactctactcccagaaaaatatgttcttggcagattcagattcctctagtcttctgcccaagagatgagtacttggagctaagagcttctacagaattcagtggttaggactatttaagcacctaactaaactcaagttcagtttactagattgttcaattgtccctatctcaactagtttgtaagattttgaaggcataatcacaccaagtacactgctgaacccccaagaacctagtataatggccagcactaacttaacattaaatgtatatgttttttaaaagcagcatcaatactcatatcccagcataggatagaatgacttttgactttttgactttctcgtctttccccctagtaggctcagagaactaagcagcaactgaatcattagtaaagagttttaaggtgagaatattggccctaccacaatttctttatctcctgatcacacactgatcagctactgaggatcagcaggattaattcacacaaagaaatgaattacagtcttcacttcctaaacttgtaatacataactgacctggaatttagtttctagtcaagctctctgctttactgagtcaaaggcccaaaaaatgacccactcaagaagatagagccatagagcagtgagaacagccaccatattaaaacaactactcattaactgatgtctacccctcttagaaacaaagatgaaaaacactgaggaagtcaattactacaactcagatttaattatgtgtataaatcgtatttttcaaagttagcatgtccattcactccaccaatatcatttgaaaaaatgaaaacataactactgaataaatgagttggcattagaataaaagaatctcagttggaagggaaaatgaaagagatcactgatcactggagtcctgtggtctgggagtctctagggttcaaatcataaaatgataatctttggctaatttgcttaaatttttaaaaacttaagcgaacccatatgtttactttcaataatgcctcagtaactaaagtagcaagtgtttcacttttgctagaattcaatgcagcaaggtaacacaatttacctttatactgataaaaagcaagggctgtcaggcctgaataaaattaggaaaaattattatttaataaagtttggtacactttctaaaagagatccaaggtgggggaaagtttggtggtttctgactgcaatataaatctgattcaacttaccttaaaaatggtttgcagaatgagaaaaatcaaggcacatactgaaaagaggtaaaacagaaaaggaacaggcatttttgacaaaataactcacttcaaaactttcctaaatatctaggtctcatataaacttgactacttgtttatagctgaacatgtgatagaaataactaccaatctgaacatcaataattatgactatcaggcctctaaaattataatgtaaataaggaaaaaaactgattcactgagagagtatttataatcatttctttcaaaacaacacctgttgtatctaaattatatagggcataaagatgtttaaagtacagaaaaacaaacagtcctattaaattgaggttgacgatacgctagcaaacctggaagcctataactctccacagtcatttcaatcctaagggggaaaggtgctatacagaatgtgatatagtcttctggtagctaccattcttctggtatctacttctaccatgaagaataaagagaagtgaatgagtaaagaagatgtggtatatagaacctactaaatgtcactcagccatataaaagaaggaaatcattaatgccatttgcagcaacatggacggacctaatcatacaaagttaagtcaaagacaaatctcatataatatcacttacgtgtggaatctaaaaaccgatcaaatgaactcacagacacagcaaacaaacttatgggttaccaaaagggaaagagcttgggagaaacaagatattcaatatcttgttataacccataatggaaaagaatttgaaaaagaatacacgcacacagaactgaatcactttgctgtacaccagaaaccaatacaacactgtaaacttcaattaaaaaaaaaaaaaaaagcagggtaaagtgaagagaaaatctaagggagaactagggcagagtatagtattaaacagtgctaggccttattggaaaagtgagatatcagcaaagatattatcctatgagcaaagacataatctattaaattttgtaaatgtgaaatgtcttctgacccagtggtttcacttctaggagccaacattacagaagtactcttattgtacactaaatgtatatataaagctattcactgcagcagtttgtagtatcaaatgttcaaaaataaactaaatgtttgttaataggggaatatataaataaattacacgcccatacaatggaaaatacatccactaaaaagattaagctaaacacagaaggagaggtactcttcactacatgaaaaaagcaaggtacagaaaaacacaaaaactagaaacttttattagctgcctatggaggagaagtgggtaacttaggggaaaatatgagagaggttttcattgcttacatttttattttttttgaatcttaaaccatctgaatctactgcctattccaaaagcatcaataattacttaaattggttaaaaagtgtaaataaataataaaacctcagtgaaaaaaaaaaatcctgtgtgtgtgtgtgaagggggaaatgaggaagggttagaggggcagaatgaataaaaatttatcagtggttatttctataaaggtgggaatacaaagagagcaatggatattcacttctcactttaatactatgagtttcaaatatatatgtgtgtttgtatataaatattcatttatatatgcatgttcatatggaaatatatatttatttgaaatacagaaagggaaatatagaaaagtgggaaaaaatgacaagaaagatgttagggagaaaaactacatgctctgccttgaaagttggcattcaaatctgttaacagttacaagagtcataatgaccacaaaataaaataaaatgtcttctcagaagaagcctagctagtcttcattcagagatgagagtaaaattccttccatggttcctcagaaaacacaatacatgctgcagtaaaaatagcagtcaaattatatattattataacaattatctataattacatgttagatatatctgagtagttcatgatgaaagctcatgatgaactttaataatgctatccgacgtatatattaagtttaagacactaaatggtgaagagggaagaaacggtttgattaaatttagagagtataaaagtagagaaaaatcaacaaaaccaaaaactggttttttgaaaaaaagataagcttgatcaagaaaaaagattcaaattagttaaaattagaaatgacataaggatattaagaccaaccttatagaaattttaaaaagaatcataacaggaatgctataagccactgcctgctgacaaatcagataatttagattaaatggacaaacttctaaaaagacagagatgaccaaaccaacacaaaaagaaactgacaatttgaaaagacctgtaacaaagttaaaagactagactagtaattttaaaacctctccacagagaaaagtcgaggcttagctggtttcattgatgaactctaccaaacatttaaagcagaattagtatcaattcaccaagtggacggagaaggcgatggcacccaactccagtactcttgcctggagaatcctatggatggaggagcctggtgggctgcagtcatggggtcatgaagagttggacacgactgagcgacttcactttcacacattggagaaggaaacggcaacccactccagtgttcttgcctggagaatcctagggacaggggagcctggtgggctaccgtctagggggttgcaaagagtcagacacgactgaagcgacttagcagcagcaccaccaccaagtgaaagtgaagtcactcagtcatgtccgactctttgagacccatggactgtagcctgccaggctcctctgtccatgggattttccaggcaagagtactggagtgggttgccattgccttctccaggggatctagccaacccaggaatcaaaccctggtctcctgcactgcagacagacgctttaccgtctgagccaccagggaagcccatcaattaaccaaaatgctccataaaagctgaagagaaggaaacatttcccatctcctttggcagtcagtactaccctgacactaaaatcagacaaagaccctgtaaggaaagaaaatagagaccaaaatctcttatgaacaaatgcataaaaatgctgaacaaaatacaaggaaacaaaatttaaatatatgtatatatataagaacaattacacaccataaacaagtgaaacttatcctagaaacacaatgttggtttacaatctcagaggaatataatacattataataaggagaaaaaacatacagttgtctcaatagatgcagaaaaaatcatttgacaaaatcccaaaccatttgacaaaatactcaacacaactggaacaaaaaagaagttcctcaacctgacaaaaggcatctccagaaagcccacatcataggtaacagtaagactgaatgttctcccactaagatcaggaaaaaggtaacaatgtattggaggttctaggcagggcaatcggctaagaaaaggaaataaagggcatctatctcaatcccaaagaaaggcaatgccaaagaatgctcaaactactgcacaattgcactcatctcacatgctagtaaagctcaaaattgtccaagccaggcttcaacaatacgcgaaccgtgaacttccagatgttcaagctggctttagaaaaggcagaagaaccagagatcaaattgccaacatctcctggatcacagaaaaagcaagagagttccagaaaaacatctatttctgctttattgactatgccaaagccttggactttgtgtggatcacaataaactgtgggaaattctgaaagagatgggaataccagatcacctgacctgcctcttgagaaacctgtatgcaggtcaggaagcaacagttagaactggacatggaacaacagactggttccaaataggaaaaggagtacgtcaaggctgtatattgtcaccctgcttatttaacttctatgcagggtacatcatgagaaacgctggactggaagaaacacaagctggaatcaagattgctgggagaaatatcaataacctcagatatgcagatgacaccacccttatggcagaaagtgaagaagaactaaagagcctcttgatgaaagtgaaagaggagagtgaaaaagttggcttacagttcaactttcaggaaactaagatcatgacatctagtcccatcacttcatggtaaatagatggggaaatagtggctgactttattttggggggctccaataccactgcagatggtgattgcagccatgaaattaaaagacccttactccttggaagaaaagctatgaccaacctagatagcacattaaaaagtaaagacattactttgtcaacaaaggtccgtctagtcaaggctatggtttttccagtggtcatgtatggatgtgagagttggactataaagaaagttgagtgctgaaaaattgatgaagaaaagatagaaaagatattactacgacaataatagtgtataacttcacattttgtttctatataatttaagagagtgatacattaaaaaatcattagtttatgtttttggactcttgatataaaaaggcatacttctgtgacatcaataactgaaaggagtgtggacagggctaatgaagtatactgctactgctaagtcacttcagtcgtgtccgactctgtgcgaccccatagacggcagcccaccaggctcccccgtctctgggattctccaggcaagaacactggagtgggttgccatttccttctccaatgcatgaaagtgaaaagtgaaagggaagtcgctcagtcgtatctgactcttagcaaccccatggactgtagcctaccaggctccttcattcataggatttttcaagccaagagtactggagaggggtgccattgccttctccaatgaagtataattttctatattattgaagttaagcttgaaaaaattcaaattagagtataaaactttaagatgctaaatgtaatcccacagtaatgataaagaaaacaaagaatatacacagaaggaaataagaaaggaatttaaacatttcaatacaaaaggtcagctaaatacaaaagaatcactgaaaatagaaaatcaacagaaaatccaaggaaatcaaaagctgatactttaaaagatcaataaaataaaaaagcctacagccagaaaaaaagagagtgaaaaagacgacacattattataatagaaatgtattgactctttttttcttgctgtcttttgaattctctctttaacttttgccattttaattatgatatgccttgggttcatactgtctgtgactttgtgtttcctgcacctggatgtctgtttcctgtctctgtttgggaacttttcagccataatttcatgagataaattttttacctctttctccctctcttctccttctgggacccctattaatgtgatttttagtacaccaaatgttgcacccaaagtcccttaaacaattctcattaaaaaattttttttctttttgctgttgggaccaggtgatttccattattctatcagataccttatgcattcttctgtatcacctaacctgctgttaattttctctagtgtttttcatttcagtaatcctgttttctagctctgactggttctttttgtatgtgttttctaatcccttgttaaaattctgtgttcatctattctattccccagttcagttagcattcctgttactattggattctttataaggtatttacctcgtttcatcagatttttttcggggttcttgccctttcatttgaaatatagtccttagtcttattttgttcagccttctgtcaccatgaaattaggtgaaacagttacctatcccagtcttgcaggcatggcctcgtgtgggggtgtcccaatgcagtctgcatgtgcccagtggctctggtctgcgagctgctggatcacaagcgagcgaaagcaggctgtcttcccctgggctgggcaggcagccatcattctgatggcctgaagttggagcagctgcagtccgaactggggcttctctgctcaagggcggtctccaccctataagaggtgggggcggggctccagtggctggaacgaagtgtactgagacaagtgggtttctgacaggagaccctgtctaggtatggggtgcgtccagggctgaggacacggggcagaacttctgtgctggtttctctccctccccaacccctggcgtgcatgccttggttagagacccagtcaggacttgagctggcgcctgcgctcactggccaggtttcactcccctccagatgcgcgcagggacacacaagcctgcgatggcaggccccaccctagagctagttttactccccctcaagtgtgtccaaggtcggcttaccaagtgacaacattctccgcctgggatacaccgacacccaggctggcagtgtctgcctccacactggtcagagtcggggcagggtgcaagcaggctcgcagcccaagtgtgcacactctcaggagcagcccgcgcctcagtgggtgcagcggctgggcaagaggcgctggagcaggagccctgagcaggctgcgggatacactgggatggttctggtaagccggccagggctaaagaagttattccatctgctgactctgtgctgtgaccgggaggaggcaagtctgtgcatgtccttcaagggccgagtcttggtttcttagagccctctggtaagccccagtggtttccaaaccagctcaaggggtcgtcttcccagtgttggacccgtgggctaggtcgcctaatacatggctcaaatccctcactcccccagggaaaatccccaagcctgtgccatctccctccccttctgtaccctccactagcaggtgcaagtcccgaccagaccagactgctgctcctcccttcctgccagcctttgtgtagttcttcctttacagccttggttgagaaagagccatctggctcgttcccaaatcagtttttaccaagcaccgctctatatgtagttgtggttttgatgtgttggtgagcgaaggtctactccattgtgatctctcctccccaggtacgggttttcacagtggacgcaccaatatactgttcccttttctctatgttgtcaccaacgcttgttacttcttgtctttttgataataaccattgtaacagatgggagtggtattttactgtggttttgatgtgcatttccctggtgattagaggttaagcaccatgtacttgttagccatctgtgtcttccatggaaaaatacctattcagtccctcagcccagtttttaactggattgtttgttctttaagtattttggatattaactccttattagatacaagatttgcaaatattttctcccaattggtaggttgccttttcattttgtcaatatttcctttcctatcagaagctttttattttgatgtagttctacttgtttatatttgcttttgtttgctctgctttgggtgtcaaattaaaaaaatcatcgccaagacggtggtcaaggagcttgcacctatgttttcttctaggaatttatggcttatgttcatcaagtctcttaatccaatatgagtaatttttatctatagtgtgagacagtggtccagttttaccagaaccctttactgaagagatggtcttatcactattgaatattcttggcttcttctgtcataaattaactgaccatgtatgtgtagcggtttatttctgggctctcttttcttttgtcttgatctatgtgtctgtctgaatgctaaatcccattctattctgatgactacagctgtgtaatagtttgaaatcaggaagtgtgatggcaatgataatgatacaataccaaaggcatgattcataaaagaatttataacctggactttattaaaattatttctgctcaacgaaagacactgtcaagagaatgagaagttaagccacagcatgggagaaaatactggcaaaaggaatatctaaagaggactgttttctaaaacacacaaactcctgcaaaaactcaacaatgagtaaataaacaacagattaaaaaactggcgcaaggtgtcaacacctctccaaagatgtacagatggcaaataagcatatgaaaagatgttcagcatcatacgccattaagagaatcacaaattaaaacagtgagatatcacacctattagaatgggcaaaatgcaagacagtgacaataccaaatgctcgcaaaaatatgacagcagcagcgctttcttgaacggtaccaccactctgtacacaatttggaagtttcctacaaaaatgaacatactcttaccataggatctctgcaataggatccaacaacaacactccttggtgtttaaagagtggaaaactgatgtccacaataaaaatctataacaaatgatatagatatagaagcttcattcatagtagctaaaaactacaaacaacacaaccacctttcaataagtgaatggttaaacaaactgtggtccagccataccatggaatactaccaaaaaataacaaagaaacaaactattttcaacaagctggattgagttccctccacaaaattcctgtgttgaagctggagccctaagtatctgagaacataactgtgtttggagatagggtctcaagtggtacgtaagttaaaatgaggacagaagtgtaaagctaattgaatctgactagcatccttacacgaacaggaactctggacacccaaaagggcaccagggatttgtgcacaggaaaaccattccagaagacaaggagaaggccgcagaagaaaccaaacttgtccatagcttatcttggacttccagcctccagaactgggagaaaacacacttctgttgtctgagccactcagtctgtggtattttttttatggcacccttagcaaacaaatataatgacatttaacatcaatgtgtctccagggaattatgcttaatgaaaaaaaagacaatccctaaggttaaatactacatgatcttatttccatttcattcttgaaattacaaaatacagctgactcttgaagaacatggctgcaaactgtgtgttatatatagtttttcaatagtaaaggctactgttgttttccagtcactaagttgtgtccaactctttgtgaccccatggactgcagcacgccaggcttccctgtccttcactatctcccagagtctgctcagattcatgtccattgagttggtgatgctatctaaccatctcatcctctgctgccgcccgccccaccttgcctttgatctttttcagcatcaaagttttttccagtgagtcagctcttgcaagactatagtactacactataggcattttttttcccaatagtaaatattatagtactacatgagctgagattggctaaactctcagatgtgaaactacagaaatggaggaacatgtacatgaacaaactgtgtatatggagggtcaaccataagtaatacagattgtcgactgtgtggaggtttgctgcccttaaccccaacactatttaaggatcacctgaatgttatctttaagtaaagatcttattaaatgtctatgtatagtcaaactggtctattggtattataagataatattaatacttgaaaagatgattataatcattggtcacttttggggaatgttacgagacaaactcatcagcttgaaaactagtcaataaacacaaagaataaagcacttatcatacctttcctgaatgatctatacttcagaataaacacagttgatggaggaaagtttctatttacagaagaattacaactattaattgaaaagggaaagattagttcctctcatggctccagtcaacggtcatcaataatagcttacattaaaagagagagaacaagacattatatgtctaccaataggcatacacaacaacatctctgaagcatttcttctgaaaaatatcaacccaggatctgatcaggcctctagaatcatttctaaaaaacacagagaattaggaaatacgttaaacaacgaaggaggtataatctgtaaaatgcacacagtaaaaaatctcacaggataaaaactcatttcttcaaaaaatacagtgaaaaaaaaataagaaaagaaaggaaatgggggagggaaggaaaaggtaaaatctacagactgaaagagattttaagacacaaatcaaccaatcacactgtgtaggcctatttaaatcctgaacttactgaaaaaaagaatttatgaaacaagataattcaaacaatggatatttgatattaaggaattttcattaattttatcaggtgtgatgaactgtggtgcttctgttgtttggaggggattgtcttctggtgcagcttgtaggatcttagtctccaaatcagggattcagtccatgacccctacagtggaagtgtggaatcctgatcagaggaacaccaggaaatttcttgtggtcattgttttaaagagttcttttttttcccccccatacatactgaaatatgtatagatgaaacatcatatcttggatttactttaaaatctggagttagggagaaatagagtttggccatgactgataagtactgaagctggttaagaggtatgtgagagttcagacgattttctttaacctacttatataaatatctgaaactctccaaaataaaatgtctttagaaattaatcttagaagtagaatcagaagtaaaagaacctgcagataccctacatctgtaatacaaacgtaacattcacgcccatgttctctagcagtttacagtccatggggtcgcaaagagtcagacacgactgacgacacacacacaaacatgttcttaaatgtattttgctcagcaaaacccacaagcaatcagaatataagcaccatcttcaaatagatagggtgtatatataactaaggactaaaaaattacaggtaaagaaatttttcattacatataattttaaaatatatattctgctaaggttattaagaaacctcttcatatttttgtagcacagcttaaatagaatgcctagttttactctaattccaaactattctcttcaattatctttctaaatgtaattacctctaaaatgcttctatcaagggtaatatatttcaaagcccttgaatatatacacacacaaataaacataccaacatacaaatacacacacacccccctatgcaaaagcctaaaaggctgatattcagatatcatttctgcttatgagcaaactgagaactggttaattgggattagccaatttgcccaaaatcatatagctacattacaactacagtaagagttttttgccctgaggtccaaggtttatttcttctctgccacactgtcattcaagatgcagaaagaaaaccaatattccaacaactgatttaccataagtcacagtatgagaagtacatctgaccaatttcttattttattcatatgctgtaagcagcatgaacacaatttaatcatatgacagcaaccacatattacacacttactaaacatttatacaaaaaggagaaatttctagacaaaataccaaacctttcctttaaaaggattaatatatgctttcctgcatgtataaacaacttttttttactctcaagaacctaaaaatgtgaattttaatgaaagtgccacgtcagaatcactatacatccattgaaaatttcaaccattttaactgatccttaaattcttttaaaaaatattaatataagattttctgcagtaggtcattagtaaaaatattctgctggtatgaccaaatataagcactcatttacactaataaatgctttatatgcatgaatttaatctaccaaataactccaagacccagaaattattgttagttccatttacaaataagataattgagacttggagattttaggtaccttttcaagatcacagaggcagtaaatggtagatttgaaacttgagtcagtccagtctcatgacaaattcttgctcttaacccatcctttgtttcaataaacattacctattttcagttgccaaaaattaccctgagtgaccacattcttcttgtttcaaagaagatagccaagtacaactagaatggctgcatcagagacaggctcattttttcactctctggcttctcagtactcactgtgtcacattctcccttagaaattactgtctaaatgaagattaaattatcaggccaactctcaaaaacttaactatcactgaaaataacatttctatggaagagtctggtgaactgtaacagaaaaatacaacatcatcctgtcgcacccaacgaaaagatgccccaagttccaaatgtaacatgaaattcctttcttattttcctcagcacacaaccaggaatgacttctcatctcctagtccccatcaagagcatcattaggagatgagttttaaactatgccagttcccatggaagatagggacaaagccaggagaaagaaaagggtaggataaaaagcagtaacatttatttatttatatatgtatatatgaaagccgaagcccaaaactattactgctagaattcagtctttttaaaaaagtttcctgtgaactagcctgcaaatctaactaccttattatacttactaagaggtctggattcctgggtcaggaagatccgctggagaagggataggctacccactccagtattcttgggcttcccttgtggctcagctggttaagaatccacctgtaatgtgggagacctgggttcggaagatcccctggagaagggaaaggctacccactccagtattctggcctggagaattccatggatcatagttccatacaactgagtgacttccactttcaagagatctggaacacaactcacttaaaaattggcaactatctgcacttaccaatactgtctataatcaactaccccttctcaactttctgaaaactaagagcctagtatttacggaagagagagaagtgaaggagtgatgactctctttaacagcacatgcaaagaaatggctttgtacatgatgtacccaaatcagtggaaatatatattaggtgctttgatatgataataccaaagtcattcatccaagatacttcaagaatgcctttttagtatgtagttctagagtatgttcagatctttggaaattgtgaggtttctcttttttttattaccagatgttgaagctgaaactccaatactttggccccctcatgcgaagaactgactcactggaaaagaccctgatgctgggagggattgggggcaggaagaaaagggaacaacagaggatgagatggctgaatggcatcactgactcgatggacatgagtttgagtgaactctgggagttggtgatggacagggaggcctggtgtgctgcgattcatggggtcgcaaagagtcggacacgattgatagactgaactaatagaccgaatgcttgtgtccccctcaaattcaaatgctgaaaacctaatgcccaacaagatggtatcaggaggtagagccttcaggagtgattagatcaggagggaagggccctcatgaatggaatcggtgcccttctgaaagaggccagcaaaagctcccaccagctctgcaaccgaggccagtgacaaggcactatctgtgaattccctgtgaataaagaagtgtgcctttactagacccagaatctgcctgcaccatgatgttggacttcccagctccagaacagtaagaaataaatttctattgtttataagctatccagtctaaggcatttattttaatagtccaaacagactaaaacactagagatttttttaaacagttataaatagtatttttatgggatgtatataaacatattttgctgcgttgatcggatcagtaaaaaaacaagtcagcagtgtactctaatacaatgctgaatgaaaatgtaaactcattaaaagtgattagagtgcagtttagcaaaaattaccaatagttttataaatgttcatagcttttgactcagtaattcaaattgtaagaatttatcctaataatcagagattcactcattaatccatttaacaaataattgaagacttaatttgcgccaggtatctctcttacgaataaggatgtttatcacattattttacagctccaaaaagttgggagggaaatgtcaaataacagaaagctgacaaatcagaatacatctaatggataaaatattataacaccactggaaatgacattatcaaatatatcaaaaaatatttaacaacataaaatgctcatgttaagaagaaaacatttttttaagatacaaaactacatgtaattacatatatatgtatgatcccaaatctgtgttttatatcttattagtcggaatccttagttaagttactcaatctcactcagattcagtatcttcatttataaaatgaagattttacattttacatataaaataaggattttatacttcacttcttaaaggcttgtcagatgagttacttgcaaaatgcttataatattctccagtacatatacagtgtcaataattatttgctagtgatattattatatacatagatgttgaatatatgtgcatatgtattcaagaaaaaaatggaatatcaaaatattatcaagattctgaattctaaataatataaggtaatcaggaaatttcaatactgattatatattatgatattaaaaattattttatgagtcattttttgttttttaaaaagtctttatagcataatgaactatttatgaataaaatatgaaacctaaggtttgctttaaaatactttggtgaggcgcttacatggagagttgggttttaatttttaatgttatcagaaataaattacctctggataacaggattattagtagctttgctttataattttccactttccaaattttctatggtgattaaaaattatttctgaaattaagaaaatgttttcaaaaatttttgacattccttaccaatactccatccacagatgaaactttttcccaagttaaccaagctctttctctgacatgatctggtatctttaatttctgacataatgcagtaaaatcaggttcttcagtttcttcaaactcaagcctaccaaatgaaaaaatatataataggcacatatttacaatcaaattaattaaataaatatttgtttcaatagtttgcatagaacagcactatcctgaaatagagcatcactaaatactttagaatcttatttatctttgaaaagaattacacttagaatttaaacatatatttatctttttcagtctttccagaatggtaatacgacacagtgaaaaatgtttgctggtctggtgaatcacatacttcagagcagcaaagtagcttaaagtaagtacaagagctaaaactgggaaagttgggttggttaatagcaagaggaaagcaatagataatattacaaaaccaattcaatatcattaacttttgctaaaatgcagtctacccttcacagtgttttatttaatctacttactagtagttcttagatgatgattaaattcagcctttcttcctgattttccttaaccaagacaggcagtcaaaaaactcttcttggctaattctttttcaatcagttaatgtctacttgacctctaataataatagtacaaggaatcgctaataattttttagtatttattatgatcccacacaaagtaccttagatgaaggtagattgaatccccacatcagcctattaggtaagtcctcttaccctgttttacagataaataccacatcagagaagttaaagcactcacttgaaatcacaaacagtatgtcagaaaccctgatagaaacccaataatctaactctataatccttgcccttgagcactattccagactgctaacccttctctgaaacataattaacttttggttatctcaagaatgaagatggtgtgctgcttcccttaagtaaactctcaattctcaaagcagacatgggctccatcactggaaatgcagttcgactgggccctgaacccaccccaggtaaagttctcagcttcagactgccaggcagcggttctatctttgttaagtagttaacccgtagtttgatagcccataaggacacattttataggtaaggacagatcaagaacaggctttatcttgcatggttctgacttaaagaattcatgatagtttcatcatttaaaagtatataaaatgaagtgttagaaaatagaaggaaaaaagactttcttttcccgggtgctggccagaacttcaatatttctggttactctacaatattcaagaatgcttccaagctctgtgggtaacatagggttctttgcagtagacttcaccgctcttaccaaaaggaaactggaaaatactggacatatcagagtttaatcagaaactaatgtcttctcctagaacatccctgagctttcttttttttttcccccactagtgagaatgatatttaattgataagacagtcatatatgaatttctaatagcctttcacaagccatttccaaaagcttttcccaaccttttaacaatttgtcccgaattctcttagtgcagggggaggtgagagaaatagggcctgctgatgggctaggactgtaggagggagacagaaaggagtcccatttctctgtaattgatgtgcagtctcaaagcagggccaactctgacaataatatggataattatactcgttcaatttttggttctaaccataaagcatcacaatcaagaaaaataagatgttgcaatacattatctccctgtcacgttccactgcattatcgtacacttgcttaaaatttagaatcctcttacgagaagaaaaataattccacgtgagcacaaaaacactcgttttgtactccaacaaacgaaacaaacagaaaaaaaaaaaaaaacaagcacaccaggatccttgctggctcaaagccgaaaggcaaaatggaagaaataacgaggcacgctgaagccaacgaaaatacgcaagaagagttctagaaaacaagagaaaagtttaggaacttgtaagctcttggcctaaacgtctcacaatatttttgcccaggcacgagtcctttctaaagagttacgttccaccagtcactaccgatggccgtgaatccccaagaccgaaaacccccttctaagagaacgccacaaggcgcctcagccgagcttcctgggggataactgacacccaggaccctgcccttcacgtccgcgggcatgtctgccgctgcatccaaggcttttctgactgtctctcccgggactgggcttcagatagagctgcgcgcccgggggcgggggggtggggggggcggtggacacttccaactgttgcatcgctagagaccaaaacagaaagtcaaaagaccactggaggactacaaatctcaacggggagaaaaacccattcagcaaacaccagttagttcttttctatttttctcttttgcctgtggtggggtctcgaaacacccgccggatgcgcagggccgtttcgcggagcaaaggcggcacctgtcacttcgctcagcgacccgagccccacccgcccgacacctgtcaagctggagccgagaccccctcccggccgcccttcccaggcggcgcccgcacccagacccctgtcagctccctcccggcgctccgccgcgaggggtggtagaggggggacggtcctcccgccgggacccgcgccccgcggggacgcgcccccgcctagacgccgcggcgcccgccgacgcagcctcggggcgccctccccgctcgccgcccgccgccggtggctcggcccgctcacctggccagaggcaggtcctcggagccgctgtcctgctcggggtcctcctcagggggcggcggcgggggcggcggcgggggcggcggcgggggctccgcggcggcggcggcggcggcggcggcggctgctctccggggggttttgggcggcatgacgcgctcgcagggcaggcgccggcgggcgctggaggggggccggagaagggagaggacgcgcgcacctcgggcacgccccgtcctaggccgactcccgttacaaaaataattcgaacgttcccctgagaaaaaaaccgggccggccctcccccgcccggcaaccgagcgccgcgtccaaccgcgggaaaacgtcacttccgcccgcggcgtcacgtccgcgaggctcccgggcccgccggcgtcgggagggcaccggggtgctgggcgaggcgaggcgaggcgaggcgcgggccgggcgggcgggcagccccgggcctgcaacccaggcgcccgcccggaggcagcggccgccgccgccgccacagcctgcctcacctcgaaactcgcccctgcgggcgtgggtggccgggtaagggcgctacccggcccggtgggtgcgcgcgggctccctcgctatagccgggtggatccggggctgcggccgaggcccccgccgg

SEQ ID NO: 241 - DNA, 59237 bp, Hippotragus leucophaeus
  source 1..59237: mol_type = genomic DNA
taactacataaagatgtccgtttccatcaaatcaacaagtctaatttagactaatacagcattaaccactcaaagtttgatgaacagtccttttccaccttaatgcagtgtaggaagaatagcacacattaaagtttgttacgaaaatagagtttattaaaaacatccctattgttttttgaggagctttcaccgttaccttgtcttaaattaaaaaaaaaaaaaaatagagagcacttctaattacgatttgtaaactttttaaagtcaaaacttttaaaaagttacagcaaaaagggtaatatttattcatatttcagtatttttttgttgttattttgtggctatttttaaatagaagggaagcaatcaaattgcttacagctcccaccaactactgcggggctgtgacatagcgggagcacgtataatacagcatctgtacaccccaagccctaccctcctgtgtcgccgtcatatccgacagatcccagtctcttaacgaggagcctctgctgctgagccggggtccttctcggggttgacggatgaggtagcctcagcaggtaactcttcagaaggctttgcgactgcaggcccaggctcccccttaggaagttctgaaacagtgtctacgcttcccgcttggctaatgggaggttccacggtcttgttactgcctgccctgtctgtcacctcgggcttctccttgcctcggttttcttccttctctctacgagactctctatctctagaatctctctctctgtctcgatgcccgctagagcgtctattcctgtcttccaagtctctgtgcctgtcccggtcggggctcctccttccccactctctcctctcacggttactattctctcgatcatcattacggttcccataccgttcccggtcattctccaccctatttccaaaggatcttcttccaaatctttcttggtctctacctgaattgaactgctgctgcctgctgtcatttctgaatggctgcggcggctgctgggcgggcggtggctgctgggcgggcggcggctgctgcggcggcggctgtgcaggctgctgttgctgctgctgctgctgctgctgcggcggcggctgcctcccgtctcggtcctcaggaccccctgggcctggccctgggcccccgagccctggcatcccaccaggcctgacgaaggggccgtggggtgggaatgggcctttcattccgtgtggtggaggcattccgaagccccccgggcctggcggtggacctcggtgcatcatgtgtggaggcatgggccgaggtggcatcaagggaaaccgctgtaagtgaggcggaggcattcctggcgggcgctggagtgggatcatgccagggcgggcaccaaggagaccggtggatggggcctggagcccgatgacgggacctggtgcaactccttgggtacctgatgaggcaataaaaatgcaactgtaaataaagcaacacagagatagcatattctattttcagctgtttcctgtggtgcttggagcaaaatgaaattcacaatcttccaacgtcatactgtttgccagtctacccaggagaaactcaatgtgaagtcctagcaacaatccacggcaagcagtcctaaagatacattacacaagttatgtacacacgcctacctaatacaagcagaggtccaaatatgtcacataaggagactaatatactacactttggaaaaagtatatcaaaatgcctttctgcatagccttgattagcagctgttttatcactcaaaatacttgagaaacacaatgcactatgtcctaatgagataaagaaatgaactagctgagccaactgaaacttatttcaggtgtactcttagaaattttttactctaagtcttactttgactttctattaggaaaaaaatggagtcaatgacccagaaaatccagtgaagagggaggtttctttgagtctgtgacattaaaatgctttacgtagttaatgtgcagtcacatgctcagttgctcagccgctttgtgaccccatggactatagcctgccaggctcctcttagaatttttcagccaatactggtggtggtttagttggtaagtcgtatccaattcttgcgactccgtaaactgtatagcctgccaggctcctttgtccatgggattttccagtcaagaatactggagtgggttgccatatccttctccagggatgttcccaacccacggatcaaaaacactaacgcttgtaaaataaagattaacacaagaaagtagagtttgttttcacgtctctttttaaagcacagcataacatgtaaactgctatgccaaaatgactgctgaactatgccgagtgctcagccattcaccttctattcattttcccaaagatggcaggactgataaaagttagtgttgctgaaagtgacaataactactggtcttatttcctacttacaggaggcattttgcttatgctttagtggaacagtcaaattcaacccatcatgtatgatacagaaaaggaggaaggatttgtttcacaacttaattaagtaacaggtatcatcacctctctcatttctctgcaaatattaacattacaacaagctactctaaaaaggaaaatggtatgatcagaaggtgccgtctactcacacactgcagagatgtctttggcaagttgtaggttgtgactcaagtggcaatggtgagagaaatgcttgtgcaaggctgacagaaactaacctgaaagcacacccaccactttctcatctctcccccatccctaacatcttgttctttcatgtttacagattcaatcccttcctcccactcactttagcaaacatttaagcaagtcctactaaatcctcacaacagattttctgtatacataattattactaacatggaagacaagaatttctaattcagtttttgctcctccgaacatatggtccaatactactctgtcagacttaggaactaaaaagagtggactgaaaatgtacgtgtatcaattataactcttaacatgaagttgtaactcttatcgctttacttagagtaccttcttttaaacgcttaaagagaaacatttggtgaaaaaaatcctcacacaggagtgactctggacacatgcctcagaaatagggataataatacctgctttttgctgatatgaaatgggataaaacacataagcatgagctcagagcttggcacatcgctaagtgctgaagttattattctatacatctattttgacagatggtaaatatcctaacactaagtatttaactttgcaaaaacaccatgttttgtatttctcatcattaagatcttattagcctctcctggtccctcaatatccaccatagtttagaatcaagcattttggtaattgaaagaaattaagcttccatgttatcaggcctaagaaaatattaattaccataatgaaaagccacaaatgaactggatgaatgaggcaaagacctcagcccttcacagactcttcacacttatactctacctcagaatgatatgaaattcacagcaaactttgatgccatttactgtacatttactgagactgtaccatatagtgagacaatagcatctaaggtatttccttactcccactttttaaagaaatcacacagtaccaacacttgtggacttaaaacaagcaacataaaatatatgtacccatgtacagcctctttcaacagtttatcatatacagaagcacctaaataaaaatttcctttcccaccagcttttactcaaggataaaaatgataaatgtttactctgttaaaagacttggtgtggcactttctagtagcaaactataagctcaaggggccaatagcaagttttaaattacactagagacggggaaggggttaaaagtattttattataacaaaataattaagttcagatcaatctttaaaaggaaacagatctttctaggacaatgggaatactgatgggttcctcaactaccaatttgacagctgccaaaggccaacctcaatctttgtacagagatcaaatgggcaatgattctctataaaatataaacctatgtctaggaacgcatttctaagttctttgtaacatgcatctgagggtacatattgacttaacagggttaactttcacagtacatgcatataatatatatattttaatatttattttgtcaaactggatctttagttgtggcatgtgggatctagtaccctgaccaggggctgaactccaagcccctgcactgggagagtgaagtcttagccaccggaccaccagggaagtcccatataacgaaacctcctacagacactttataaaaaaaaatttacttttaatttttggccacaacatgaggcttttgggatcttagttccctaacaaggtattgaaccagagtccatggcagtgaatgcagagtcctaacaactggaccaccagggaattccccaaagcatacttttatacagaaaaaaaaaaaaaaaaaaaagcctaatttatctatccaacatatgtggatatttgtatttgggatttacttaaaatattatacaaatacttttcctctttcataaataagctgatttccctttaaccctttatgggccaacaaagtacagactcctctgacagtatttccatagtaccaaatgttggccttcaaaatacacaagtggtagaattagatttcttttgctcatctgttgtttgcagtgaacaaaaaagtactgcttttaattaaagttacatttgattaaaaaaacatatcaggtagtataagcccctggtagggataatagctgaatttcatttttattaagaaagctgatgttatacacataccagtggaatatgcagtgagttacccaggtctaaaggacattcaaagcaattattcattttatttcaaagtctgatgtgcaatatatcacggacaagttttccagagttataaacttccaaaaaaaaaaaaaaaatttcacccgtacgtatgttgaacatggaaactttttttacattgttaacacatttactgtgctggggatgttgttctttagtcgctaagttgtgtcccaacctgtgttgaccctgtggactgttgcctgccaggcacctctgtccatgggatttctcaggcaagaaaactggagtggggtgccatttcgttctccaggggaacttcccgacccagggatcaaacctgcattggcaggtggattctttaccacttggccaccagggaagcatgtgctggggatataaggactaaaaataataatcttttccttcaaacagaatatagcctagtagaaacaaatgttaattgctacaggagatggcacacactagtatggtgacaagagtaaaactgataaaagtcagtgtgtgtgaaaatgagcagaagtcccatgagatgtctgaattaggtgtcaacagaagggaaaaatattcaggccaacattaggaaggaaggatattacaatcaagaggatggcgcttctgaaaaggcctattagcaagctgcagcagtaaagtgtgctttactggagcagaatgtcttctgaatgaaaatcgaggagagaaggtgaggtttattattgaagcagctagaatctgtacaactataaatcgctatcaattaaaaattagagaaagaaaaaaagatgagatgtgtgaggccgaacaaggtaggccggggcaatccaggtcttcgatgtgtaataaggaacttggactgatctagaatggtgggaaaaccacacagggatttttagcagggatggtcctatgttcatttttgaaagatccatctttcaggaaagcaagaagggggaggagggaggatactagagaatagtgaggctcttatttcaaggatccaggagacagaggtgagagacgactgaaaaaggtgctagagaaggaggaacacttaagtttttcaacagcagcacgggcagaatcaaagagctgggggaaacagctctctgctttgaacgagaggatggaggcatctgtgcaatgcagaaatttaataacagaagcaatttttggagacagatgacaaacttcacatggtaacactgagggttggagaggcctggtctacacctgatggaaatgtgctcaagagattgattaaatgtatagagctcagaagattagcagtcagggtgttaacttatccagaatatgagggaaacaaaaaagggaggaattcagacctggggaaacagcacagtacataggaaactccaaattttctaatacagcaagattttaaggcagacaaatttaaattcaaggagtagaagaaactcgtgcgtgtgtgctaagccacttcagtcatgtcggattctttgcgaccccatgaattgtagcccgccaggctcccctgtccatggaattctccaggcaataatactggagtgggttgccataccctcctccagggggtcctcctgacccagagatcgaactcgggtctctgcattgcaggtggattctttaccgtccaagctactagggaagaaactcattggagtttaaatagccaaggctatttcctatgagtcaaaaagtcctcaactgttccacaactaaaaaacagatatcaagattagagagatgccactgctttctatagcaaagatgttggtaatcatgggaaataagaaacaagtatgttaaaaggctaaaggggtggtgtgggaggggaaggttgatatggttggaggccagtgtggaccttgaaatctcagaagaataaggcttgacttatttactgtggcagagaccagctaaatgtgttacttgtattctttcatatgacttaaatttaagttggagtttttctttttttaaaaagcaaggatttgctatgtgaagaaggaaatgggggagagcaaggggaggaagggcagagggaacatctgaaaaggccaatcagcagaaaggatggttcttctgcctcttctccaccaatcatcttgtctttcattctaccacagccaacgcctctgggaagtcctggacttttcatcagaagcaacttcgttacttccgacttctcgttttcaagtaccccaaacaacagtcaatcccactaggatcatattccccatgcccctcacggctttcctttcctccttacctgtcttgggagtccatggttctccctcaccatgctgcttggaaattggttttaaatggaactcttctacctaatctgcccctgaatatggctgggcaccacccccaacatgctgactggcctcattttatttgtaactacaaccacaaatgctcccttaatcctggccagcaattctaatttccggagtcaattcacattcttatgcttctaggtatgtttcaaatgttcctgtttttccttaattgtctgctcttgcctggttggttttatatagcttctgggaggtaaaattcatatagcccacaattcacctatgtaaagggtgtagttcaatgttttttaaaatatattcagagttgggcaaccatcaaaataaattttagaacaatttttatcagctcaaaaagaaaccctgtattcattaactaccattccccatttcccccaacctccaggcaaccaacatcccatctcctgtctctatggacttggctattctggacatttaagtggaatcatagaatacgtgaccctttgtgactggattctttcacttagcattatcttttcaaggcccatccatgttatagcatgtataagtacttcatttcattaccaagtaatgttaaatggaaatgttttatttatcctagttggaatagcattaaaaaaaaggcatttagaaagactttttcatccacccacctaccaccaaacctaccctttacctgcacctgtatccgtactgctccttcagtctgtgaacatgtttggaacatgtgttccaaaggctaaatgaagccctacactcaaaccccaaatctaggcccccctctcatctatgtaagaatatcaacctagaaaatctctcttctttgttgcatcaaaaatttcccctctcctgggttttcatgctggagttttgtccatcttttagaaattaaaaaaaaaaaacaaaccctccctcactgtggatctcccttcagctctcaccaccattttaacgttcccccatatggcacatctcctcagagtaagatgtccagaatcactgtaccattgcctcatctctcattctctcctatacatatccttatacaggcttttgaacccatcactccaataaaaccgcattttccaaagtcacccagaagttttcattttgctaaaaccagttggcaagtctcggcgctcctctttgacccaacaatggcctctgatggttgctgtctcccctcctccgtaggaactttctttactcagcttccagagtacctccctctactgtttcctagctccctggctgtgcctttgctggatggaacagtacaggacagtggctaaaaacacgggtgttggaacaagggtatcttgaattctaggcactgccacatggagctgtgaccttgggcaagttacttcatctctttatgcctcttacgccctatctacgaaatggggataactgtgttgacttcaaaggattgtaaggcttaagtggttgatatatacaaactcttagttctctgtaccgtattttcaactgctaagtgctgcagtattcctgggctcatcctcgcactatatcccctccctaggtaatttcacaactggtggctgtaaatgtcatttatatttgctgacgccagaacttatctttaccagttgtttagctgacatctgcacctaaatgtcaaaacatccaacatatttaacttgacatcctcaccctaaacccactcctctgagattttcccatttcaggaatggcaattacactaccaaatgcttaggttaaaacaaacaaacaacaaaacgtagtcattcttagttcttctctcacgtatgtaagagagtcactttgaaggctctatcttcatccaaaatagtcccctcattccactcttatcaactcttgcagtttgctttctccagaatggccatatacaatcctttgaaaaatgaaaaccagttcacaacagtgttcaaacccacacttgctgttgcactctcgactgacgcttgataactggctctgaactcctcatggctgctcttatgttcaccttgctccagccctacagccctctgcagttttgttcccagtccaagctcccctgtcttctctaaataagatgctcttcctctgcatctacctgactctttcctcttattatttctcgctatattacctcctcagaagccttctccagccattttattcagaacagtacactgtacacaacattcctccaatcccgttctctttactctcttcacaagaatatcttcatgtgaaattattagtttacttattatctaagtccctgctagaatgtaagctccaggaagataggccttctcttgtcattcaggtatctctagtacccagaacggtgcctggttctcagtaggtattgggagtaaacatgttgaacatatgaatgtatggtggtggcataaactgacaagataacctctcagggggcaaaaagtctctccccagggtggtctctttccttacctatgaagacctgaaattttttttgaggaaagctgcaatgttctttcacaacctctttttccgctcccagtcgcagtttcactttttttgattccaaaagaatgccactgtggcactgtacatgaacctaattcgaaatctgttcacacaaggaaaaagatataccagccactctcacctctcccatcaacactctgagagcctctaggcatacagatatgtttgttgaaccactgaaagctgtcttttttcttttaaactacagaccttcaggaaattgaaataacagtacaacccaaacatgttgtacctttgcctagattcaccaattaataataattagggcataattattctgaagagacccccaggtgattcttctagcaggtactgtgttgggagctggggagaatgaaaaaaatgagctagttttcaaagaatgagagagaaagcacatgttagattaccttatacattactacaccccccccaaaaaaggaatggtagcaaagacttaaaagaaatttaagtttcaataatatatagtgtaagtacactaagatgtatatctatttttagcatggcataggacatgaaaaccctaattttaaatgaaaaaaaacagaaaccattctctcttaaaaatgacttcttggtgtttttttttgcaaaccaatctacaataaggtttgatcaattttcctatagatcttttatagttttttttttagaatttcagtttgtatacaaaagcataacaggtgtgacttaagagttaagagttgtactactggactcaagaagtctgggatatactggtaatccatcactgaatgggatcatccgtaattttcagtgttatctggaaaaaatcttacctgcaattcttcacagcattatccttgtctatcaaaaatcaatctagagcccagagtttctgtccctcctacctaccttaggcagcaaaagctgtcaggtttaaattaaaaagagactctttaggctggagttctgcagcctagaaggtgcagacaagagatggagacaatgtgataagcacctttcacatttctgtgcaagactttcccaagcttttgtttgacgtgcttcaccttctgagaaaatatagtatattcatgtataaattcgtacccaaagtatttgttgtggattgatcactattaatcattcaatgaacaatgtttttatacaaagttgaaagaagcactgtgatgagtattttggaagcatttcttaagtataaaacactagtggaataataaaatacaatatttagagtaccaattcaaatattttaaagctttcaaagaacacttttataggacaaaggaacatttggtagaccccctctaggttataatttaatataaccaacatcataaccaagtctacaataagaaaaaaattaaaatgcaaaaagtgttttaaaaattagacattaccattaaaaaaatattgagaattttcttcaggattcctttaaatgttattcacactagtagattggtgctctaatgttctaatttaaaatattaaaaattacaaaaaatatcaaaattctggggagaaaactctaaagctaagtgaaatcacaactcaaaatattaattttaaagtacagttgacccttgaaaaacacagatttgaactgtacggacccacttacacagactgctttcccagtaaatacgtactacagggtatgtggttggttgaatccacagatgtgggacctcggttactgagggccaactatacaattaaaagtggattttcaactgcacaggagttgaagcccctaatcccagcactgttcaagaatcaagtggaattacagaagttgacaataaaattgttcatcttcaagacagtattaaggtcacagctatggcataaaagcaaatatacctgattaatttacaaaccaatttggtctacataattcttgatgtgttcaaattttggaaaatcaaatgccaggcaaggaagtgtgaaaaatcaagcacgaaatacatcatactactgtccagcaattcagcttgcaggccactgatctgtgacttgtgctttaaatctttggtaacaaatattatcaataagatggaatcttacacatacccaattcttacttataaagtttaccatcagtttatatagcactgtgacaaaactggggagaatctctgtataataataattaatgaatgtatgtacctgacaagagaaaagactttaattttgcacaataggaatgagtctgactcagcttaatttcttccttgaaaagatattttggatatgctggtaacacaatagatatgtaacacaaacaaacatttttttgtgtattttttttattgtttggaacacgaaagtaacccaaatttcacattacaatgaaattttaaataagaatatgttgtacattgtattagagatacatgttatacataagtttggaaaagtaataaatacatacacttatacagtaaagagaatgtactgaattgctattatctttaatattccttctcttctaaatggtcaacaactgtaaactattaactttaatgaaatgaccactgctctagcaagctatttgggagtgtgaggtattaagcacagattcctttaaaatcaagtaataagttattattgtgcatcaaatactttttatgttttcagattatcggttactaaaacaataaaaaatctctagaagatggaggtggttctctacaaatctggtggtgtgggctacctcagcccaattccagaaacagagagtcatcacttctaaactaacacctacacttaagtctgatcattcagaaaactctaaaccaaaccatccttaaagcaccccactgcctcctgcataaccaagggccacaacagaattttggaagatctgttgaacattttactggcccctctagtttaaaaaataccattgccacctttcagaaattaggatccaagaactcagttaactctcaaggacatgtttacctttcattgtaagaaaacaatttgagtatcatgaataggataaatacagataccatatcatgctatttaaatgaaatgcccctactatataaccaatacacattttattactaagccatgatggaacttctatatatgtgaacttaccacctggtttaatatactataaaaatatctgaggcaaccatgccaagatacataatttcctaaaaaagctaattttactgctgacaattagaacaatttaaaataaattatagctacagtaatataattttagaatttccaagtataaatactcttctttattctaaatattgtctatgatatttcttacctgtaataagcacccaccattcactgagtgcctactctgcgacaggccccatgtcaggtgtttatatatgtttgttagtccaactaaatcatcccaacaccctggtttaacatttttatttcttttctcacagatgaagaagctaaagtttagtctcacctcctaggcttaaacttttctgtatagtgtaatgttgctttctattatcgtaagagaaaacattagagcaccaagagaaaacatgaaagcatcatagttctagtcttctgtttcgtggctgacatcaacaatatccaacctacttactgatccttcagtactacaatactgtatgtgattactatattcctttatcaaaatgatggaattgtgatcagtcttttggataaatcctcctttatttgcatatacattaaaaagtctcatttctataaaaggtcaaaattcatgggatactcttttcaagatttttaattgaagggaaacagaagtatattttttcatgattcaaaataaagctactgcattttacttaaaagtgcttatttgaaacaaaactgttcttatttttatgctggatcagttattttaacctttctagatctggaacaacctttatttcctaaattttttgttttaaaagttaaggacaaagatcatcgtcagaggtgaagtataaacagccctacactgaaaagcatccatccatccacttaataaatattcctctctcatggagcttccagtctggtgggtgggaggagatgggcatctaagcaggtatgttgcataacaaaaatgctaagaaatttgattatttttctagcactgactaactttgatttgttttgtttcacatgaatttaaatcacacatttcagtagtgataagaaattaagggcagagtttccaaaggctaaatgttaaataaaaggcaggatgtttattcttgtttgtttttggctgtgccatgtggcttgtgggatcttggttcccagcccagggactgaacctaagccacggcagtgaaagcctggaatcctaaccattaagccagcaggggaactccctgggttatttattcttgaaggctgttcaaaactagtggttatcaaagtcttagagatgatgaaatcttttcactgatttagtgaatttactaaacccagaaaaaaagcacaaatgcaagcaaacagtctcaggcgacctaatacctatggacaccagagtaggaaatttcatttcaatgagaatttgtaatcaggagcatgggtgtggggtgaaggaaagagggtgatcagaaaattctacccaacttagattcactgtgattcttatataatcgtcttattacaaatattggggggggggttgtaacaaaactgagatccaaagatacagaggtttcctggcccccagtctactactgttccttctactacgacttccatcggggcacagacctcttaagcaacttccccatcaaacaaatcattgtgcgttatacgatgaccactggacactacttgtgacaaattttaaccataaatcctcttttactattacccattcggtgtactaaaagaaataaaaatcaagtttattgttagcctaacctcagtcttggagagggcagaagacagcatgccatttaaaaacaaattaatttttattataaatgtagtacacgcaacaaagtaaaatttccaacagtcctgaaaactgcaggtgaaaagtaaaagtcctacatcacaaaccaacgtcccacagccctatatcccaggagtatagggctctttccttaaaaaaaatctaagattaggaaaacaaacatttgtgcacaaacacacacctttaaaaaatacaatgggttcacaggattgaaacattacaatagtaaggataaattaactacccattatcagaatcaagtgttaattatagttagcaataccacttcaaatataataatttcttataggatgaccactgtaacaagtatatggcatattcatttaaattcaagcaagcaagggtaaggcctcttaaagatgttaacaatctaaaccatacttccttggatctctgaagttgagttgtgggtaaagaatacagcaggttaagtcttatcagagaaactgaggggtcagtggaaaagcattgcctcaggctgtgcaactgtcacttaggtaacaaagccattttattgcaatgtatcaaagatagtctctttgccagcctacagagaatgctatcaaagtccaggaattttaaatatataaaaattaatccagacagaaaaaaaaaactatgttgctttaaagaaaagtctgtatcttacttattatgccaggatgcctggggttttgttaatcatggactatgtaccaattcccgttcatagagattcgtctgatcacttttctataccaaattaagatgtgcaaatccaaacttttattcaagacagagaaacaaacatgatttcatttttgaggctgtctcttaagggtaggcttggtgaagaccatgtacacatatttaaaagaaagatcttcctccaaggaaaacagcctcagagaataatttaccaaaatgaacactgtttctaaaaagactaagttgggcaggggaaagaaaactaatgataaaaaaaatgaacttaccaagaagtgaaacaggctgggttacaggaggggtaggcagattcgtgggtgcagcaggtggcacagcagagccatacattttcacactgtcaccagactcggcgtttcctctagccccagacaccactgttggaatgggatttccaatagataagtcttttgtagtgtcttcatttataccagcgatagtagctaaggaatataattacatcaacatgtgaagctgaataattaattatcaccccggttaacattcttttgccatactatagaacctattactggtccattctccctcctactcccaactccaagaggacaagtgaacacaaagaaaaaacatgcttacagtttgggatgtttattggtggagtgtgaggaggaggaatggatactggtggagttataggaggtgggggtccaggaggaagaaaacctagaagaagaaaaacaacgccaacttaagttgtgtcactttatttcaggctcttaaaagagagtatcttctcaaataacttagtgtacctggtggcaaatgcattgggttgaatcctgggcgcaaaaacggtggcggaggtggaggaggaggaacaccaggcccaaagcctggaggtggaattcccaaaggaggcgtgaatgcaggtggctggagagcaccaactacaggaggtcctggctgatgcggtgggacctagaaagaaagagggaaatgaagccacgtatctagccaccctctcactcatatagtgcgtagagacaaagaaaataccttgctaaaaaacccagtatctctaaattgtgcttattatgtgaatatacttattagataacagtggtaatctgtacccacttcaaaacaatggaaactacatacttttccccctttctaaaaattctgggctgcttgctccatgtggcttgcaggatcttagttcccccaccagggattgaagctgcaactttgcagtgggagcatggagttctaaccattgagctaccaaggaatttccaggattcacagtctgccctctacttatcaaagcaaataccacactgtgattcaccatcacctatactggtgttctccagaatattaatgttaaaaaacgtctcacagtcaggtcaattaagtttgaggaatacaactctaagaaaagctaccaggtaatttgcactttaactgtgattaagatcacagttcctggggtcaaactgcctgctcccccttttaagtcattttgtgaccctgagaaagcgacttacactacactccacagacctcagtttactcatctataagatgaaaaagtgccaacctcacgtaattatggagattagagaataaataaatgttgagtgctaatgcctgacatgtaatacctaccaaacacttcagttattgcttaaaaaaaaaagtatcaaccttaacagattagtcaagtttctttaagagagtgttgacatacactgaaacctgcactggaaggtcatatccagaaggtcgcgtaaagagtgccaatttggggaatccatttataaaatatcacagctaagaatgtaccaaagcaagtacttttctcctaacattgagaaaaatcaagaagctaggcaaccgccctgagatagcttagatttatcttattcagttttaatgtgagaaactgaggaaagaaggtactgaaagaaaagaaaaatctagtgaatcacacatgaaagcatggatcaagtacttctaattcttaccaacacattagttacttagctcttaacatgtagcaggaaaatcacatttcaagtcaaaaagtttatgaggtaataagatattgaaaatttgggcagatgtaaggcaaaatgatatttattctggtttttgaaagcatttataaatattaggtctgacataccaatatataagaaattaatatgcatatctatgtactcacatctttgagtatgaatctagacacacatcaacagtaagatttagaaaggtatcttttagacacttgaaagcttcaacaatgcccccagtactcttacctgtggaggcggtactgttatcggtgcgggaacaggaataggaggcacaggcacaggcagaggcttaggtatgggagacactggttctgtgtgtgaggtttcagctcctccattttgagcaacttcgttttcatgcttcttgggaattcccttccaatctatgaatagttaaagaaatataatcagaaagctctctgattttaatatcatcgacattaaaaaaaatcatttctgggtttaaaattataaactgaaaatgtaagcctttgttacatacatacatacatatatacacagatgtaatagttctattttttattattcccattttatgagagaggaaaacaaagtcatacacacttggcagaggcagagatgggattcaacccagatacatttggctcttaagtctctgttcttaaccacaatggtggaggaggaggtctttggatcaaagaccctgggagggaggagcagagttctttttatcctggaccagagatgcccagaacacctggagcactggccttcaataccagcctgcctgaacagaaacgcctagctctatccgtaggtgaaggcgctgtgcacgcgcagggaggtggtgtgtggggcaagtccagccccgcactcctgactgaagctctgtaatgtctgaaatatttactctattttgccatgccatcctgtgctcctctttgtcctgctatctatcattctggtcatgtccccacaggctggcattgtccccaatgaaaattccactatcagcctggcatttttaatatccaggcttcaaataactgcatctcctcatcttacatgtttacttttgatggcttctctggacatttaaacattttcaaagaaattattatgaggcagtggatcttactaacaatgttcagtttaagattcatctgatctgttaagttttttacactgaaaaagtctacttaagagccacttaatattataatgaataatgaaccccacaatcaatcagtaatcagagtctgcatgtctctcactaaatataagttgcataaaggcaaacgccacatttgtcttattcaccattgctcccttagtttataatggagagactagcacccacctagtgggtatttgaaaaatctcaaaaaacagttcctaaggcaaagaataaacatttgtcatagtactaccaaggaaataaataaattaaaaaaactaaatactactttacctggattaagtgtatcactgtccaacattcctccttcacagaaactctccaattcttcaggcttgactttgtcccatggaatataagtaacaccaagttctacatcccaatactgcttataatctgcctttattcctttgtttagggcccaggcaatctagtacatttgttaaaatataaaacggaagggagaagaaagtcaaactgagagataactgtttctcatgattccaatcactcagacttggtcagcaagaaaacaatctggcctggctacccgtggggctcactcaaagtatctttggtgctaggaaatctggttaccctttcatcccatcttgtttgtcctagaaggaaatctgactgtcaatgatcttctttctcactcttccaatcacccctacccagacagcataaaactaaaagaaaagggaaaaatttatcatgcactggctgactgggcataagaaagtagggaacacttttaaaagtcttgggtacatcagaattactcaacattagacaaaatccttttgcagtgaaatccaagggtagaacagggtattgggactttaaggaaacactgactctggcccctcagaggaagaacacccatgcacctatatctttccctctatcttcagtgattatttttcatagttctgagatggcaaacttaaaaaaaaaaaaaaaaagacaaaattctaccacatacctagcgtttaaaattttatgttaactcttaggagataacctctttaaaaaaagatgcacatgtaataataccccagtgtccaaaactatagtttttaaaagtctcataagatatgttacatttaaaaaaaaaagaaccatcaatgataaaacagtacctttatggatttctggttcactttgtagttccctcggctcagtttttgcagggcacgataagcatcttgcctatgaaccataacaatataggcacaacctctgggaggaatcatctgctccaaaagattttaatattataaaacatgacaacaaaaccaaaaagtaacaagacataatatgaagcggtcagttccacccaccccacctccaactccctgcaccctctagagcctgtgttccataattggagtttaaaaaaatttgaaaattggtggttccagtttagcctcaactgccaatcatcaacaatctacagccccaagctttgttatataaaagtcatttgtagaaaaagattttagattaaatttggttatcaaaaaaatgtagttaaatgctaaacaaaaacttagagaacacctcaactccagccacatctcctacaaacctagaccaattttaacttaggtctcaagcccttaatttcgcaaaataacattaactacttctatctactgtcattaagaaatttaataaatactcacattaattgattcaattggaccaaactcttctaaaaggctggcaacatcctgctgagtagtccttttgtccagctgtcccacccagagtgtagtactacaaacttaaaataaaattataatcataaaaatatacacattccatactgagcagctctgtacttcacatgaaaaaaatcattacagaaaacatgcatgagttacgttatgatatccacaagtagaaagcaccatatgtgctatggctcaattgctcactcccatacaactctttccgatcccatggactgtagcctgccaggagcctctgtctatggaatttcccaggcaagaatactggagtgggttgccatttcctcctccaggggatcttcgtgacccagtctcttgtgtctcctgaaactacgggcagattctttaccactgagccacctggaaagcccaaaaccccatgtaagttttaaaaattacagtagtacttccagaaatggaaccaggatagtgaaaagtaaacggatgaggtgagaaaaaactcatcttttgaagacacatctgaagatttcatctatgtaaagagtcaagagtagctgtcccttttaaactctcgagggtaatgatttttgtttcatgctgtgtcctagataagaagccctgcagagtcagaagttttatatatgcccaaatcatattatcaattaaaatttcattaacagctatggagttatatcaagaatatctactatagattattaaacatattctaaacatatcatgaaattcaggagataatgcaagctaacacatcctataaattgtgtatctttataaagtaagagggtattagtgttctggagggccccccccacctttcctcagtgtgtagaactagttaacaactatatttcatacacttgactcaagacacactattactcatcactgttagtttggctcacttctcattgctgcttcacagtcagctataggtacaaaagcaaatctaaaggtatacgccagagcacaaacagacaagacccaataaagcagtattttgctaactggttacaaagcatttaaaactcatgacattgaaaaaaaatgcaggaaatgtgaatataaatgttcacgtaccactcgcggtttctgctttgatctgaggaaggcctttttgtcggcgctctctttccttctctcgatctcgtctttcttgggatcgagaccgaggagaatgtcggcgtctatctctggaccgagatcgagaacgtcgatgccgagaccttcgagatctagaaccagatcgagatcgtctccttttcggtgacctaatattttcaggacaagggagaatggattaatatacggaaataaagaaaacttcagcatgtgttaactggaagaggaaaaaatacaactaggtaatttaatgtaagatatgcaagaatttgtaagatgtgtaagaatttgacagtagggaattcattttaaggatttttaatatgctgaaagttagaaagcacatatataatatatacgagataagtttgctaacttataaaaaagtgtctctcatcttcgatacctctagtactattttaaatgacatctttgtaattaaaaagctaatgtcatcacaaagatatactgtgattgctattctctatcttctcagaaaagtctttttttctgtagcaattaaaaatatgtgatctgattatagtattccttaacttctttccacttttttttttggcttgataaattggtaaaggaactttgaatacataaatcttacaattccatgtgtatctgtaaacaggcattagagaaactcagagggaaaaaatactggttaagatgatttagtttataaaaattaataagtctcctacccccattccactcatacatacaaacataccaagtgttattttattagtcccatacatctgaaagcaatccaacttgatttaaatactaagtctctctaaacatgaacatctggattaacattttctataagctacctggatgctgatctagatcttgactttctgtgatcagatatgtgccgcttagcctcttgaacacaaggttgttctacttccatttcctttaaaaagaaaaacaaaatataaaacccatcattaaaggagaaaatggaaattataaacagaaaaagaggccaaaaacttacaaaatgctaaactacaaatctcttacccgtaaagttctcttttgattgagacctaattactagcttaacgatgactgggcatgagtggaaaaagttttttcatatggctcacaaacttagaagaaatacttatctacttctggaaattattttgtgaaggttaacatactgtgttaacaaaccatcacctaaagcaagtgaattaggcactgtttaagcattccatactctatctcaatcctcatgaaccctatgaaaatttatagtattattatgtccgcttcccaaaagaataagttaggtcacagagaaggtgaatatgtgcccacagttaacagtttttcttcatattcaaaactgaagatagaaagccaacaaacaggcaggaatctgcttgtaaatcaagggaaccaaaaaataatcagcaaccggagagtgaagctttacctgatgtgccttctgggtaagtggctcattttgtgcctgaaaggaagtttggaagggctgctgcacaggtggagttggaggaatcacgggctgagccatgggaggaaacggaggtgtaggaagaaggccaaagcctggcatctgtccattaggaggaagtggaaccttgtttgtttaaaacaaaaaaaattgtatgagtagattttaagtaactgctaccaaaaataattttttttaaattttagttaactttatataaaactaaaacatcttcaataaattttgatcaaggaaaaactatgacattcaaccatgaccgacaatttctacatatacaatttttatcccccaaaaaactgcttatatccaagaacagagcttaaaaatcctacaactcattttaaaattaacacacgtcaggttttataatttaaaaacataccttcatttatatgaggaagcaatgtgacagactaaacttaaaactcagaggtactctactgcaaattttctctcttcaactttaaaggcaattaagctttaggggaggaaaagtatttagaagcactgacttctaagtttgttttaaaagttttactccaaggggagtttcagccaacatgcctatggctgaaatttatttagggtttgaaatatcataataatgagagtattatgtcacaatctaacaattttatacatgtaacattctaatgccaatacaatagaaagtataattgtaatatcactataatataaaaaagtctttctaaattattaataaactatcaataattgttaaacacttggagttaagttcataggtttcatctgtattttaaacaggatgataaaatattttttaaatttcacctatcaagaagtcagagttttctcaagagaacacattggtcatagcaaacaccctcttccaacaagagaagactctacatggacatcaccagatggtcaacaccgaaatcagactgattatattctttgtagccaaagatggagaagctctatacagtcagtaaaaacaagaccaggagctgactgtagctcagatcatgaattcctctattatcaaattcagacttaaattgaataaagaagggaaaaccactagaccattcagtatgacctaaatcaatccctaacgattatacagtgggactgagaaatagatttaaaggactagatctgatagagtccctgatgaactatggatggaggttcttaacactgtacaggagacaaggagcaagaccatccccaagaaaaagaaatgcaaaaaagcaaaatggctgtctgaggaggccttacaaatagctgtgaaaagaagagaagcaaaaagcaaaggagaaaaggaaagatataagcatctgaatgcagagttccaaagaatagcaagaagagataagaaagcgttcctcagtgatcagtgcaaagaaatagaggaaaagaacagaatgggaaagaacagagatctcttcaagaaaattaagaggtaccaagggagtatttcatgcaaagatgggctcaataagggacagaaatggtatggacctaacagaagcagaaaatattaagaagaggtggcaagaatacacagaagaactgtacaaaaaatatcttcatgacccagataatcacgatagtgtgatcactcacctagagccagacatcctggaatatgaagtcaagtgggccttaggaagcatcactatgaacaaaactagtggatgtgatggaattccagttgagccatttcacatcctaaaagatgatgctgttaaagtgctcaatatgccagcaaatttggaaaactcagcagtggccacaggactggaaaaggtcagttttcattccaatcccaaagaaaggcaatgccaaagaatgctcaaactaccgcacaattgcactcatctcacacgctagtaatgctcaaaattctccaagctaagctaaaacaatacatgaaccgtgaacttccatatgttcaagctgaatttagaaaacgaagaggaaccagagaccaaattgctaacatccactggatcatcaaaaaagcaagagagttccagaaaaacatctatttctgctttattgactatgccaaagcctttgactgtgtggatcacaataaactgtggaaaattctgaaagagatgggaataccagaccacctgacctgcctcttgagaaatctgtatgcaggtcaggaagcaccagttagaactggacatggaacaacaaaactggttctaaataggaaaaggagtacgtcaaggctgtatagtgtcaccctgcttatttaacttatatgcagagtgcatcatgagaaatgctgggctggaggaatcacaagctggaatcaagatagctgggagaaatatcaacaacctcagatatgcagatgacaccacccttatggcagaaagtgaagaggagagtgaaaaagttggcttaaagttcaagattcagaaaactaagatcatggcatctggtcccatcactgcacagcaaatagatggggaaacagtggctgactttattttttggggccccagaatcactgcagatggtgacggcagccatgaaattaaaagacgcttactccttggaaggaaagttatgaccaatctagacagcatattaaaaagcagagacattactttgccaacaaaggtccatctagtcaaggctatggtttttccagcagtcacgtatggatgtgagagttggactataaagaaagcttagtgtcaaagaactgatgcttttgaactgtggtgttggagaagactcttgagagtcccttgaactgcaaggaggtccaaccagtccatcctaaaggagatcagtcctgggtcattggaaggaatgatgctgaagctgaaactccaatactttggccacatgatgcaaagaactgactcatttgaaaagaccctgatgctgggaaagattgagggcagggggaagagatgacagaggatgagatggttggatggcatcaccagctctacagacaagagtctgggtaaactctgggagttgctgatagacagggaggcctggtgtgctgcagtccatggggtgacagagagtcagacacgactgagcgactgaactgaactgatcaacaagtcactgaatcacaatgtcagtttcatatgaccaaataaaagaatatctcaaaatatgatggattcaattccagaccactttaataaagtgagtcacataaatattttggttttcacagcatttaaaacttatgctcatacttaactgcagttcagtaagtgtgcaatatatccaaataaaacaatgtacatgctttaactaaaaagtactatcttgctaaaaaaaaaagccaattatcatttgagaacccatggttgccataaaccttcaatttgttaaaaaaaataaagtgtaggatctgtgagaaatgaaaaaaacatggtatgcctttatatataatggattgaacatgatacagataagaaaatgaatatattttaaaaggtttcttagaacactttctaaattaagtctaaaaggagcatttctcaaaggttggctgtacaacagaatcgtcacataattaaaataaataaagatcctctaagattgactacagcaccagaagtctaggatatgtattttgtagtatgtttctccaattgagatgtacagacaagtttagaaaactctgaattagaggatttattaaaataaatccaatgaacaaatttagtctaacttcctgaaattctccagtatgatgtcctcatcttatactgcagatttcaaactatattcctgaatgctgaagagctgaaagccctctaaagcaacaagtcacacaacattaataaagaaaaaatggagatttccctggcagtccagtggttaagactctgtgctcccaatgcaggcagcacaggttcaacccatggctggggaactaagatcctgcataacacagtatactgcaaaaattaacaaataaaagggaaaaggggagcggggggaggcttctcagaaggggaaatgctgtataactaaataggtccgttccttaaaatagaaccaacaatctctctctcaactatttaaataaaaatacctattaaattattggcacgaatatttagcatccttgttttaattaaagcaaaaaagcaactcaaaccagttatgtgcttgacagcctttagtacagcttaaggactatttagccacccacacaggtaaatactactactctggcaagtgcagcccagatgcgctaatgaacacatctttagtaatcagaaatgcctccacctgatggtgcactggatcctgcggcactgccatcattcgaggcggaaactggtccatggtctgatgttgggcatatgttggttgtggcatgccgtcgccaggaaacccactaaaagagataagcagtcttctttttacccattcaaaaacacatcattcttggccacatttacgctacagaaacttacagaatgctgttcaggagttgttaacaatcaacattttactgaatcatttatttatttgcctatattaacttaaaaactcagcattattcccaaaataaaagtcattttttattgtaaatctgacaggatcccctccccattcagaagaaatccccaaataccacaatttaaaaaagaattttagaagatgctatatgaaaaatgactgttattaagtgttacttgcattatgccttgtaatgactataaaagttccgaggaatcaaaagaaagagacgtacaagggtgcctgtggaggggaggcagtgggcgcagccacagaaggtgcggcggcggcggcaggcgtagtgggcacgacagcggcaggagtaggtgttgtggtggccgaggcggcaacagcatcttctttcttggattcttccacagcttctggctcatcatcataatcaaatctatcaagtagcttctgcaagaggtatgccaatattccattttaaaattcaggttgtgattcactgcacaaaaaaactttataaaaacagacattcaccatcatccataatcctgctatcctgtgatgtacaatgtcatcttcccacgtgtctcttagggactctggtgcatagacaatttttacacaaatgccattctgaaaagacccttttaaaagtggtttttcttccaattctaaatacagtgtttccttttttttttctattttctatattataactaatttagcagtagaaagattttacaaaaacattttcctagactaaaaactttgcacacatgaaaatgggtatatatttttggtcggctttgtaaaatgtacacaaagaaaaaccatcttatccagtcttataactatcttataaattctgctcactcaagaatatgaaaaaaagagagaacggcacagacaaggctacaaaatctacctgtgcccttgcttctttcttaaaactccatagctcaccttttaccagaaacttccattaaaacaaaaacagaaagcaaaaaccaaccagtgtactccacaggatcacatgtctagagagtcatttgaaatataattacatttattcagaataaggaatcaaagtattgggctagcccaaaagcttgttcgggtttttccttacaatgttacacaaccactactgtgttttggtaaattatacataatacttcatcacaagaaacatgcaatgtagatatagtttcctcttcttacagacaaggagactaaggtcaggtaattaagaaacataacctagactgtacagttatatatagtagagtctagatgtggacaatagtctttttttaacctcagtccctggcattcaataaggcagtcttttcctctcagggtatgaccttcccgttcatggatttccaatctcaaactcctaaatttgtgctgttctgtgatagttctgcctggaaattctggttctactttactggacaacagatttctaaattgcttctttcttcataaatctgggccacatgattaaaaattctgattataattgagagacccaacatggcttaggcaccttgttgctttttgcacatgaggttaatttaaccctcaaggaagtaaaaaaaaaaaaaaggtactaccattgctcttttacagaggtatacagtaaatgtttaagtaactcaacatcaatagagtcaatgacaggagccaaaattaaaactcgggtctagggcgtctctgatggctcaggggtgaagactctgcctgccagtgaaagagacacaggtttgatccctggtctgggaagattccatatgccatggagcagctaagcctgtgtgccacaactaacgaggctgtgctcaagagcccaagagctgcagctactgcagcctgcatgtcctagggcctgtgctccacaacaagaaaagccaacacaaggagactagagagtagcccctgcttgctgcaactagaaaaagcctgcacagcaacgaacactcggcatagccaaaactaaataaaattaaaaacaaaacaaaacaaaacaacttaggtttaaactatctacaaaaacaaacaaaagaactctctgcagtttatcacatatagacatgttccttaaaagttttacaactcatacccattgctctgggaaaacatctgaagcaattaaaaaatttaactgagccctactatctaaaaagatatttctgctgcttttaaggaaactgaacatctatgaagtggctgaaacagacaagctgttcccagtcagctgtttgactagcttaaaatagaccttttcagtcaaaagcaaagcacaattcctttttctaaatttaatgtaactaacaaacactgatcaatccacttaacaacaaaatataaatgccactgctagcactgctattactcaacattttatttttctggaagtcctagccatcagacagtaaaaaaaaagaaacaggtctagatgttgaaggggaaaagtcaaatttagcagcctacaaaacctgagagaaccaactagaaaaaacaaagataatttacaagataacatgaaaactcagtagtttccctcgacagcatcaattgggcttccagcgtggctcagcagtgaagaatctgcctggaatgcaggggccatagcaggtgtttgatccctgggttgggaagatcccttggaggaggaaatggcaacccactccagtattcttgcctggagaatcccatggacggacgagcctagtgggctacagttcacaggattgcaaagagttggacatggaagtgttatgaaacactaaacacgaaaaatgagtaaattatctaagaataaatgaaacaaatagcctggggttcaatccctggttggggaactaagatcctttaagctgcatggagcagcaaagaaaaagaaaagtgactaacatttaaattagtggactgtgaataaagaaaccccttccataatatcggtgtgcctcaaccaatcagtcaaaggccttatagcagggtttcccaaagatggcattctcaagacagcaacaggaaaaccttttgccttgcacaatttagactcaagactgcagcattaactcttacctggatttccagcctgacactctaacttatacttgacaactacatgaaccaatcccttaaaaaaaatcccccccttctcccctttgtgtgtctgtgcctgtaactggttctgtttctctggaacataccaattcacatgcccaagaataggcaaggaatgtctgaaaaacaataaaggcagaaaacacatccagaaatgaactgtaagttacaagtgtttaaactgctatgatgccaaaacaaacacagatactagtgggacaaaatggtatctagagacagacatcgaaaaaagtgtatgacaaaaattgtgagggagaattggctatttccaaaaatataaaggtttaactattttgaactatatgctaatataagttcttgatacactgagacaaacataaaaaacagaaatataaaactactaggagaaatagagaatttttaatacaagtggggagaattttcccaatcacaacacagaacagaagactaaaaaaccacagtacttaacattttatattcacatatgcagaggaaacaggtctgaaaaaccatacacaaatcagtggaactgatttcccttttcactccagaactttctgtattatctgcatttctttcccctaaaagcatgtacttcttttgtactcaaaaattttaatccaaccttcttttaatcagtagtcacttataaatcatatagatagaacaagcagtaatttccatatggattcttaatattaactactagcaacagttactgtatcttagaatgctagaaagaaacatattttagagatgattaaaagatagttctttctaggattatcaaacttcggtgttttttgtactgcaacttgtaaaatgaaattaaattttatatagtcatatatagacaagacacaaacaggtaagagtggagttgtttaggcaaacatttcaacaggaagctctgagctgtgcattttcaacacatctatacccttagtgggagcgccttaaacatacctgaggcccaaaagagaagtctgaagacactaaaccaacccaaactctcatattatagataaggtaactaatgttttcaacaacagaaaacagaaagcaacttaaatgtctttcaacagggggaatggttaaactgatatgcccatgtaatggaataataatatcctaatgagcactcagtacatacttacatctattaaccttaaccaccacccagagacgtgaggattaagacgaaaaataagccagttaaaaacaatgtgtatatatatttattcatatagattaaaaatgcctgtttttatatatgtatatacacacacatacacacaaacacagatacacataatgaccaaaaaacaaaagaccatatccacaggaaatcaattctgaaaagatatatagcagaatgttacagtagttatccctgagtaagggggttaatggtgaatgttctgtttcctttatactgtttatttttctcttatattgaaaattctgcaatgagtatatatcacatttataaccaagaataagaatcaatgttttgatgtcgaggggggaaaatccctcaaataactaaatgaacaatccaggtaagtcagaaaagggttaacttctacagagtgataaacaatgggatgagttatgtgagagaagcataccttgtcaaatgcagttttttgttcaggtggggggaaagcagctttttgttcgggtggttgtgtaggagctgtctttaactgagctgtgatagcctgaacctgagccatcacggcattgtcaatggcaggagactgtggttttggaggctgttgaaaagtctgaaggatcttctgaagcttaaagaatgggaaaactgataaaccacacaacaaaggataatcatagtatcaaaagttaattcactaaaaaaaaaatcttaatggtgaatcaaaatagtacaggcatggaggaacttggaaaaaggaaccaaccttttagtaatggttaagtttatcttgaatgaatgtatcagggatacaatgtgtgtcacttaaggttaaaagccaatggtagacaatgatggtcagagagaagagaaaatacactgaattgtgaacaatatatatatgttttctaaaaaagtataaaacaatcatctgcatcaatccatataactttgtaactagcgctgtgagcaacttcaccacccttagagctccgcagttctctacaaaggggcacactattcctcagggtgctggtcccttgcttacctctcccacatttcccctgtatccttgtgaattcaccttcctcgcaaaggctttttccagtagatacattccctcctcacaatgtgctcggtaaccaggaatgtaaaataagaactgacaatagtacctaactgcaaactatttaatctttggacagacaatttacctgttgaccttgagttgtctgaaacagttgggccacagcagcaaaagcatcagagctgggcaactgtggtacagttggtacagagtttgtagtggcttgtgggggttcagaagaaactttaactggaggtggaggtgaacctaaaaaagaaaagatcattaaggcctcaaaaacttttaacttctaaatatttcctttaagctccattaagcttctttactaaaacaatactccattcagtttaacatacagtaaaaaatatagattatggtattacagcctatactgtaacaagcactgaatactttttattagaaataataatgatgggaagaatactttatcttccaagatgtaaactcaagttccttcttacagaaaaattccatcactataaactgattccaaacatatcatgtacaaaaaaatgatacaattctctaagtgcacagacacacctgaccttaccttcattattagtaacattttctgttaccggagcagcattactggttcctgctgccatgtccaaaagaggctgaataatttcaattttgaatactccatttttttgccaaaggtttaatacgcgaactattttactctgttatgtgaaaaaaacacgaatatacaataagtattagcataaataattatacctcttatgaaaagacagaacaaaccaccataggctaacatttccatgctacatttgtttcataaatagagaacaatctatcatcagaattacagcctcattaaatgactctaacgggccttccttcagtagtgtaatccagggtgagaaacagggagaggaaaaaaacaattaacctagagaatcagaagaaatgcattagaattacttgaaattttcatatttatgattacaaagaaaccaaaaaattcagttatctaagaagagtaaaatccaggatgattttaatagttaaaatatttaacacaattaactggcctctaattgctaggtaagttgttttgtgggctaccaaatttgaaggagatccagagaaaatgtgttattcatggttacaactcttatctcctactctaggaatgaacttttctcttgtacatcttttccacaagagcattcctccaagaatacagagaatccataacacgcaaatttatatgtcatttattatataggctctagtcttcgttattctgagcttaccagtgtatttctcctatctattaagagtctaattttttttgtctatgtttttctatctttttacagtacagagtaaaaccagctataaatgtgaggaattaaatacagtagtctgattgctaatgaatatcatttatacttcaacatctctatatgatggggaaagtcaatgattggtcccttccttgtggaataaacaacaatttgacataagcactgccctcctctactgcagaatttctttaccattcaatcacaagaaatctttctaataatgttttctttaaagaaagatgatgctcctttttttccagtggtcatgtatggatgtgagagttggactgtgaagaaagctgagtgccgaagaactgatgcttttgaactgtggtgttggagaagactcttgagagtcccttggactgcaaggagatccaaccagtccatcctaaaggagatcagtcctgggtgttctttggaaggactgatgctgaagctgaaactccagtactctggcctcctcatgcgaagagttgactcactgggaaagactctgatgcttggagggattgggggcaggaggagaaagggatgacagaggatgagatggctggatggcatcactgattcgatggacatgagtttgagtagactccaggagttggtgatggacagggaggcctggcgtgctgcgattcatggggtcgcaaagagtcatacacgactgagcaactgaactgaattgaactgatgctccttttttacttcaatagtacaacatttctaagacttcacaagaaaatagatatgactactacagaaaaaaaactgcgttttgtttcaagttcacagagatcactatgtgatcaacctttctaataatactgctgccgctaagtcgcttcagtggtgtccaactctgtacaatcccatagatggaagccaaccaggctcccccatccctgggattctccaggcaagagcactggagtggtctgccatttcctaataatacagtaggctttaaatacctaatatatatttaagaataggataagaatacaagtttaatttaaaaattataaactataccttatcttcagatggacaaagatacagatattggaatgtggcagttatgtttttagagaatcttggcccaaaaacatctttatcagttccaaactgatgacgagactgtcgcacaattgagtcaattacatataatcctggaaccttgtattctggtttacactacaaagattaaagatgtaaagtcaatacaagaaaagtaaatcacaatctgacacccattaatctcactcttatgaaactatatatccaaggttatttctacagaaataactaaagttattaatcaagtaattaaataactacttaaatgttaaattctcttactggctagcccacaggtctgtagagaactaccattctcttaatgtttcagactcccaatattttacttttttctgatccctctgtcctccccccattccaacttcctagaatcagccttactttaccaatgcctaagtcacctccatacagatctatttattaaggaaaaatctactctcattcattatgctcaaaaaaataacttttaacttttaaaatcatcaaaaagccaattttaaccaaaatattaatttcaattctaataaagtacagtatcagagaaacaaaacccaaaaggcaaagtcattcttggccttacaaactgacaagatgaaatgaatagacagacatctgcaaacatttctggtggtacaaccttcatgaaaaataatttagcaataaacacaaagccttgtttgatccaacaactctatttctagaaatttatactaaggaaaacagacttcatatttccaatgcagggggcacagcttgatccctggttggggaactaagattccacaagccatatggcatggccaaaaaagttaaaaaaaaaaaaaaaaaaaaaaaggtacagctctaggttgggagagaagacaatgatgtctaagtctcccttctcagtcctttactgacatagacatgtgctgatgttacatatgttatcaaacaacatataactgtagaagtgaaaagtggtttaattatgatgggagaaagggaagttgaaaacaccagagttatttcatttgaagtactcctagataagttaaaagtcaacagagtcgtcagggcaatggggagagaaggctcaagcagacaaaaaactatttcaaatcctgactcatagtaagtactcaatcaacagtattgctatacatttttgttttgttatgaaacaaaaaaacaagacttccagtgacaacttttctgtagagtgactttagaagtaattattcaaattacaactcacaaagtacaatactgatcataactaaaatgaggtaataataaaatggatagttaccttttttatgaacttttctactatttgaaccacatgcttataaagctgaaaagaacaaaaagaatattatccagctaacacacttttctgttcaatacatttcctataattagaaaatacctaaaacctcaaaatttgtacaatttgaataattctcagggtaatactgaaagaacccaggtaaataatccatagtcaacaactcaaaaaattcttaacaaatcagaaagaaactattaactaaaacagaaactacaaaaacctaccaaaagattcttttcttccatttttaatcaataaatcttcataaaacagttcatcaagtgactttatgggagagagaagaacaatggaactggaactaaataatgcagtttttaaagagactcactttttttaaagtgtgatcttgggtaagacattcaatttcatgaagtctgaagtttttaaataaaaataaagctaatactccactgatctattatggtaagaattaaatggaataaaacaaacaataacaacaaaaaccctctgtcattctcctcacctcaatgagttcaacttttttttagcaccacacataaacaaggtaattatgtgaggtgatggatgtgtcaattagtataagctaatcatttcacaatgtacatgtacatcaaaccgtgctctattacatactactaaatctgtcaactatacctcaataaaagtaaaaaaatataaagaggaaatacaacataacagattctgaagtatgttacaatgtagacacatcacacagttgtaattatgtactttcagcaaaacttggttagtgctctctgacttaggcctgaactacttcacaatatgaaacctcaaatttaacaataatattttcaacattttaaaaacactttccaaattaatatatttcttttactcttacctttatagctttaatagcagctttcgtgatgagaatcatcttggctcgagagatgggaggtttcatatccataagtgaaaagagcttattaaaaaaaaaaaaaaaaaggaaaaaagttttaattaaaagtaaaattagaggtttacccttcatttcgacaaatatatttgtaactaaaagaataataaaatttctgaaactaggtttaataatttgtctgaaaaagaaaaaccaagagctttcttacatactagcatcaccactttgaaaacagaatgggaaaagattatgctaaaatcagcaaaaaagggggaaaaggtaaaaaaattgacaaaatctgtaacagaaaattcataaaaccctactgaagaactcaaaactgatttgaatggaaacaaacgcaccatgttcctatactgaaaatggcaatattgtgattcaatatttaatatttcaaatccaaacctcactgagattttggaggacttcaaataattctgatgttcacttggagatacacatgtattacatcaggtaagaaatttaacatgtcattataaaaactgaatccacaatttcttgataagtcaggaataaaaatgacaccatatttaacaaatttcactacagtaaatctaacaatcagggagtcccaggagatgaaaccacacaggcacacacctttcccctaaagtttaagcccaaccaagatataatgagagcccataaagagtcataatgataaaattctgacattaagaagcttatatctagtttcttaaaatcttgtttttgttttaaccataggcatacatactcttctaaaaatacattttgaaataagtttcagggtcttctaagcattatcaatcttatatgaatcatatttccatttctctccaatttcaaatatggaacccctaagacatagaccatctttaccagatacctactaagaaggtaccctaaagaacaaaagtctccttttccagaataaatagtcctacctgtcaacaaaatactctggcaacagaatttttgcactttttcaaaactacagacacaatgggactatagatagtggtaacagtaatttttttaagaagtatgcgatacaagatatgatcaatctaagaaccaaaaacgtactctgtttaagcagagaaaggtagaattttttgataaataatactaagatgaatttgagtaaactctgggagattgtgaaggacaggggagcctggcatgctgtagctcatggggtcacaaagagttggacatgacttaggactgaacaagaacaacaatactaaaatacagagaatgggaaaaacaaagatactaacacagagactgattttttttttttaaggcattatctaattcaggtcatgattctttatttccaacacaataaaaattctccatgaatataaatgctcactaattgaaaaacaactagagacagtaatctttaaaactatataaaacaatgagaaggtaagaaacgatttaaagtattttaactccaacacaaactgaaaaatatatgcagctcacagtttataaaagggcatattctgcccatttctaagttacaaaagctattgagacagttatttattactacagttctatttccttttctggatcttaaagcagagaaacaggatacaaaaaagttgatacacgatcttaagaatgagtaacagcgagaactacttttctggccattaaaagcttgctgctgctgctaagtcgcttcagtcgtgtctgactctgcgaccccatggacagcagcccaacaggctcccccatccctgggattctccaggcaagaacactggagtgggttgccatttccttctccaatgcatgaaagggaaaagtgagagtgaagtcgctcagtcgtgtctgactcttagcaaccccatggcctgcagcctaccaggctcctccgtccatgggattttccaggcaagagtactggagtggggtgccattgccttctccgggcattaaaagcttagagaatcatatttctctgaagcctaagccagcacgaatattcattcaatgtcctacattcttgattatttctacagtaaggaactccccattaaaaaaaaaaaaaaaaaccaccaccacacacacacacacacacacacacacacacacacaaaaaccccagccaactgaggagacaagacagattagtgttatattctgatgaaatgctctacagtttacatttaaatcatttttcttaaaaaattaaaatacagactataccatatagcagtataactatcactcaggcagtaaaccagcaagagagcatttaagtgctaccgtttaagagacagacagaggaagggtatttattccactaaagaaggtgcaactcaagaaaagtggaaggaagcaacactaagtgcctaagtataaggtggtgcatcattttatttaatcacattaacaattaacatagattgtcacagctgttttcagctgataccaaaaaggattacatctgctgttaaatgattcccagggaatgtgtctggactagaatttgttggttgtaaagctcacaatccttaagattatcagttcagttcagtccctcagtcgtgtccaactctgtgaccccatgactgcagcacgccaggcttccctgtccatcaccaacttctggagcttactcaaactcatgtccattgagtcagtgatgccgtccaaccacctcattctctgtcgtccccttcttctgccttcaatctttcccagcatcagggtcttttccagtgagtcagttctttgcatcaagtggccaaagtattggagtttcagcttcagcatcagtccttcccatgattactcaggcctattatccttcagaatggactggctggatctccttgcaatccaagggactctcaagagtcttctccaataccatagtttgaaagcatcaattcttcggcactcagctttctttatagtccaactctcacatccatacacgactactggaaaaaccatatagtcaactccttatacaatgctgttgttgtaaatacgtgcaaagaccattaactatgatggacaatgcaagcaaaatatcaagtaggcatctgtgctcatctctctctatatatattgcactggttcagggataacgatgagacatactgaatttaacttgggatgcctactgaaaatccaggcagagatttcagcagactggaatatggatcttgaaaaagcagaggtcctgctagaaattgagaggttacagaatcaaaaccatgaagatgagtaagaagggaacaaagatacaactaacgacaatataccaaatatttcaatgtagcacagaaaagggggcaacacaaaagaacaccaggacaaatgccagaaactaaacctttaatgctatagtttttttcgtatggcttgactagcattacatcatgtgaaatgccaggctggatgaagcacaaactggaatcaagattgctgggagaaatatcaataacctcagatatacagatgatatcacccttatggcagaaagcaaagaggacccgaagagcctcttgatgaaagtgaaagttgctcagtagtatccgactctttgcgaccccatggactgtagcccaccaggctcctctgtccatggaattctccaggccagaatactggagtgggtaacctttccctcctccaggggatcttcccaacccagggatcaaacccaggtctcccacattgtaagcagattctttaccagctgagccacatggtaagcccaaaagtgaaaaaggaagagtgaaaaagctgccttaaaacttaacatcaaaaaacctaagattatggcatccaggcccatcaattcatgacaaacagatggagaaataatggaaacagtgagagactttcttttcttggactccaaaatcactgcagatggtgactgtagccatgaaattaaaagacacttgctccttagaagaaaagttatgaccaatctagacagcatattcaaaagcagagacattactttgccatcaaaggtccgtctagttgaggctatggtttttccagtggtcatgtatggatgtgagagatggactataaagaaagctgagtgccgaagagttgatgcttttgaactgtggtgttggagaagactcttgagagtcccttggactgcaaggagagccaaccagtccatcctaaaggaaatcaatcctgaatgttcactggaaggactgatgctgaagctgaaactccaatactctggccacctgatgtgaagaactgactcatttgaaaagaccctgatgctgggaaagattgaaggcagaaggagaaggggacgacagaggatgagacagttggatggcatcaccgactcaatggacatgagtttgagcaagctccgggagttggtgatggacagggaagcctggtgtgctgcagtccatgtggttgcaaagagtcagacacaactgagcgactgaactgaataactagtattatcatctgcagctgggaaaatgctcaataaacatcactaggtgcagcattctctttgctactacacatctgcattcagaattaatgtgatctgtcaaaaaaacaaaaaaaaaagtatcaacgcagccacagaaaatgatgcaattctcttatacaggataatagcagcagtaggccccaaaaggtacaaaacctccttagaaagccttagtaagaaaaacatacttgccagctaacagacataagtttgttttttttgttgtcatcagttgaatgactattagaaaacctaaacatgaacactgttctgctgggtgcctgatatacaaagtattctaaaaattacaagaaaaaaaaatcactcacaatgattcctaatatcaataaagaacaattttaaatttggcccatgacacctgttgaattcataaggtttgagggttagtcaaaataacatgatactctgctatttattgacagcataaactctgacaagtttagttaaacttttctgaatttcaatgatgtatgaaaaaaagaggattagtaatattcaattcactgttgggattccctggtggctcagaggttaaagcatctgcctgcaatgcaggagacctgggttcgatccctgggtcgggaagatcccctggagaaggaaatggcaacccacaccagtattcttgcctggagaatcctatggacggaggagcctggtgggctgcaagtccacggggttgcaaagagtcggacacgactgagcgacttcactttcataaaactgttaggattaaaggagataatgtatattatcttggcctagatctgacacataaatggctcggtaaaaagaagtacataatgccctgggaatcttaacatagatctcaagtttaagtttttgtcatgaaactgaaggtgttagtggttcagttgtgtccaactctttgtgacccatgaactgcagcctgccaggcttctctgtccatggaattcttcagccaagagtactggagtgggtatccattcctttcaggggatctttcccacccgggattgaaccaaggtctcctgcatttgcaagtggattctttaccaggtaagccaccagggaagcccaatttttttattatggcttagcataaaaactgtattgtgttacatctactgttcaagtgctgcatttggagaaattttctctatactgaaaacaaagcagtatcaaagacttttacagctttatagcaccttactacctaatttagtattcatactaaactcagaactgctttcacaatatatctggcaggtcccatgttagttcacaggcttactaactcataactaatcagctccaacagttacagctgtcatctttgtactgaccccaaatctcccttctgataaccttccttcccttttcctgctctaattctgcctctggagcacagaacagtagtgatctttctcatttgagaaagtaaacataactaagcatgttttcttatctgcttcaactattagccaaatgatatgatttctagatctgactatactggctaattccttttaaaagtatgatacaacaaaataaagagggcctggatatattcctgcagaatctagtgggttgtcttttgtatcagtttcctcttcctgcaggaacacattaccacaaactcagtagcttaaaacaacacttttggaattcacaacctcattagtctgaaatcaaggcattggtagggctgccttccttctgggcactctaggtcaaaatctatttctttccttttctagccaaagggtgcctaaattcttttggctcttccatcttcaaagctggcagcatagcatcttctgtccttccttagcctctgctttcactgtacatcactttctctgacttttcatgtctctctcatttaaggacccttggggttacactgggttcatccagataacatgggacaattaactcaaacctttaatcacatctgcaaagtctcttttgccaagtaaggtaacacattcaaaggttctaggattcagaacatggtcactctggggtaggggagatcatttattattattatttttcaaaatactgcttagttggggcttccctggtggtccagtggataggagtctccctaccaatggaggggtcataggctcaatccctggtcttagatcccataagcctgtgctccacaacaggagaagccattgcaatgagaggcccacgttccgcaataaacagtagccctccctcgccacaactagggaaagccaatggagcaatgaagatccagcgcagtttaaatatatagtgctcaattcattattaactcatatttataagcgaccaaaaccctcagactgtttcactgcaatctttatcagaactagaacttcatgttgattttatgttggtttctgacagtccttcaatctacttaggtagtctagaaatcactttctgttttcaacgtagcagctattccaattagtttgtaactttcatgaatctgctatatagatggctttttccaacaccatggtttttttaaaattagaaagacctatacttgcaacttgtaggaagactttatctaataatccgtggaccctgacagttagctaaaattcacttaacaatattctcaacttatcaatattttttctaatttattcaagatgaaatcatgacaaatatctgaaatatatggagtcctcactagacaaaacacactttatgaaagaaaaatgtttgatttggtctgtgagaatctgttctagctccaagtgactagaaatctttaggcagaatctctttcaatgggatacttaccccatcttatcctcttaaacttactataatgaattatacttgagatatctagtattccttcctttgctattatgatctccatgatgacaaattctgccttaagctcctgttattaataattacaaagtttaaagaaaaaatttggatgctttcaaaaatacatacacatattcacagtaataggctggtactcaaatctcccttctgacagatcaagttatcaaagtgttcgagtctacaatcttcctccctcttttgttcatttgtctcatcaaatctgatacattggcttcaaccaaatcaagagttaaacccaacttaacttaaatgtttactggtaaaatatactttataaaagcacacattaaatttaacaaaagaaaacgtaggggggaaatcttaaaatcatctccacaaagatgctttgtccctttaattatagcctgaagacagctctataaaatactgctagaacaaccaggtaagagatactttacagtctcttctaacctggcatttcattttatgcctttaccaaagctttgtctgagctaattctttaatactgggcacttaatgtgaccgtgggtatgtatgtgagacaaagagacagagagagagagttgggggtgtgggtgggcagggaaggaaagaagagctgcaagccaagcatgttagacaagtaccattataccactctaccctaaagcagaatactgtgcatgagttaatcaataacaaacactaagaaaaacaataaaactggaatgtacaaagtataataaatagagccagaaactaattaacaaacatggaaaaaaatgttcagtcttaccaatagtcaaaaaggtacaaattaagacaatgagataacagttcacttatgtatctaatgggcatgagtgtagattagcaaaaagcaaagaaagcactctgctgatgagaactaatggggaagtttcaatttcagagagaaatctaaagctatatatatcaagaactcaaaaagtctatatcttttaaaccaacaattccacttttagaaatttatctaaattagatgttccccaaattcccaagatggcttttaaaatcagaaagcaattcatgttatcactggtaaccatacccaaacactagtggaagggggaaaaaagactgacatactctaaaatgttaaagatatttggtgggatattttcttacttaaatttacctaatttgcattagttcaaaaataaataaattagaattcatgggttaaaaatggaaaactttacatttgtgtctgagacacagaaatgcatttctccaacttgattgtaaatacataagatcatcattaccaggtacaacttgtctgcggagtaaaccatatctttgaagttaacacatatgtttaaattaatgtcttgtaaatctttaatataacttttcaaaactgctaaaacaaaatttttaaaataaacataaaatctgccatttaaaatctttataactgaagtctttgtgcataaaaccccaaactgaaaaatcacataagtacattttttgacatctgtgcattaaagaaagcatccctttaattactgatatatgatttttgttgttttgttttagtcactaacttgtgtctgactcttatgaccccatgtactgtagccctccaggctcttctgcccacgggatttccaaggcaagaatactggagtgggttgccatttccttctccagaggatcttcccaacccagggatttactcccatgtaagttatatttattttccagagagtcaaatcctttgaaacccaaatatttaatcaattttccacctggttaaaggaatgcatggaggtaagacaggtctggcactaatatacagtatgtctaataacagggcaaatttacatggctctttagatgggaaaaaagaaactacacagttcctttgctcctatggagcagggtctttacttaaacactacaaatcagttctacttatttctccataaagttataaaccaggtatttttacaaacagcaaagctgcatatactattctcaagtttaaagagtcttaaaatttttcatacttacccctttctacacttctttaccttactatacttacccacaaactcaccaatttttctcctggttccagaaccaagggaaatgctttacaaaatacacacatataaatgcaaacatatactgttaaattatatatgaaaccactttcaagttaactacttatgtttctatgtccattatgaaaatagaatatagtaatatagcaaacagtagtttaaacttcctccctatttaattatatcaccaatccctaattctgttaccatgtgccgctgccagaactaattttctaagtagttaatttctgatgactcactccacaaagtatgccctaatttattcttcatgtaagactaactcccttacaatttccaagggtctatccttcaattaaaccttttactttagaaccaaggctgctgcaccccccgctgtcaggccttttaaccccctcagttccacttactagatgattttttattccttacctccattttgattcactgaactgcaatcaatccttaactcctttgtcttcacttgctcatgaaataggccaggatttgatctttgcaactgccaaatattctacccatgccattactccccattttactagcatagctgccaggtttcaaaattgcttttattgtgcctcacgaagtaaactttgtgtttacccaaagctggctatcaaacattttgatgaattaaacagctccttccagactaactgaacaaataaaaaactggttccaggatataaaatcatttgattagaagaaaaacactatcctatacattgtacgttttatccatacttacttttctccccacaaagttgtaatgactagatctaaacacaagcatgggattaaaactgaaaaggttaacatttataaaatccccaattaaaaattttaattgtgaatataaattagcaaatgaaatctaacgtctaaaaagcatatcttaagttcacaacactgactgcatctactgcattactgtagatgacttaaaacttccaaacttcatccttcttaaactctggcaaatccttccacaaatatacattacagtgcccttgctactttgagtcaaatatacaaaagttgtttgggaagctctctcccttcataaacaagacaatagtcaaagatgagctgctcaaaaaacttcagagcagtactgtggggctgtggattggactcaagcagcctcttaacagttctcggtcaaataacaccatcccttccagcttccttacctctaaaatagagagaaaggtatatataagaaatatatagaatatataaaatagaaagaaaggtatatataagaacccatatgctagtatctagttgggaataagcaaatgcaagattcatttactgtccttcccttgaactgtctctgctggattacttcttaaaatagcattgtaaaaactaaagatatcctttcaagaaacttatgattcaggatcaacagaacaacttgcagagccagtcagcagctaatagatactgttttcgatctgctaatcaaatcaagcaataaaataatgaaaatggtgttaaacataacttttctgtgttatttttaaaagagctccgagatacaattcatataccataaaactcacctctttatagtgtacatctcagtggtttttgctatattcagagttacaaccatcaacactatgtaattttagaattattttcattatacctcaaagaaatcccatacccactagcggtcatccccattccttctccatcccctcatgaataacctactttctctctatacagatttgcccattttggactatttcatatattaaaacaaaacccccaactttataaaatatgctcttacattagtcaacaatgtttaaggtcttcataaagatttgaacacatctccaactgaaccccaaactcggctgtccttgataaagtgatttatcattcagcaacttgtaaatacagtggaccaggtaatatggtcacatggttatttaaagaatagtttatgctttctgaaaacttaaaagggtattaccataaatttccctattacaggctttctatagggtattctaattctacatcagctaagactaaactctgacaaaagaaggatcaaagtggagtattcacgatagagggcataaagatatacaggggatactgcagaagatttatagacgatagcattagataattactgctctccagagtagtaacacacctagagttgaacaatgggagaaatccacccaggggcaggcaaaaagtgggtgaattgtctgacttacaaaataataaaactgtttgaaaactgttttatcatcaacaaatactagcaattctaaatgatatcagggataaaatattcttttccctaaaatatttggttgaccgagattcttgtttttcaggatagcctgtagtctcctcaggttcattttatatctccaattctgcacttcctaagtgtatatattcaaatgtttaaacagtacatttaacgtatgatagctgtttgcagttcttcattcctgatatatctttttttgtgtggtataaatatttataaacagcagagtgagtcttaaagaaaacacaaagcttgatgatccatgaataaaaatatggagaatgccattacatataattttaaagaggttcatcaattacaaaagagacctacatagaaactgtgggtgaaatattttagtgaaatttttttgactgacagtacatttggaagtcactagttgttgtttagcagagaagtcatatccgactctttgcgaccccatgggctaaagcctgctaggctcctctgtctgtgggatttcccaggcaagatactgcaatgggttaccatttccttcttcaggggatcatcctgacccagggatcgaacacatgtcttctgcactggcagatggatcattaccactaagtcgccaggcaaagtcactagaatcgatgtcaaaaaagacatgggtagtattttgatttccagaatttattgtgaagtgagcttttcttaaatttctgccaaaggtaactttatgtttatgatttcccaactattgtgtatctgctgctacacatacaacctttagtaaatagaattaatgaaaagtgttcttcaaccacttacaggtggagataacactgctaaatctgactataattgtctactgaactcaaatactgtgaaggtcaacactgacaatcatttgacaaatatgcagagttaagacttaaaagaacctgaatattattattcattactgtgatagcagtatgtaggtaagattttctacatataacagaaagaagtattaatgaaattttaaaacattaatcaattatttctttgttgtaatatttacttgtaagtgacatgaagttcaaatttctttcttggctaatttcatgattatatttgaaaataattttgttgtaaaagaggaatgaagctaaaaaaaaaaaaacagacagacgttctcaggatgtcaaatatgttaggtatgctactgtctacaatctcctccacatgacccacttggatttataccaaaaatcatgaattatccaaacaccaattataacttttaaggggtacctgtatagccctccacttttcaagagccctggtatttcccccaccccatctgaaccttggcttctaattcttaaatccccttcagagtttcactggatttcttgctgaattcactactaacttatacaatgctttctcaatattatcaaagtttctataaatacctctggcctcacaagcacgagtaaagagtcctaatacaataaaatgttaattgataaaccatgcaaatatttaaaaggatgaaggtgactgaagcataataaattataataccgtttcagcaatcaatcttctggttcacaaaaaaaaaaaaaaaaaaaaatcacgaacagtacattgttaattacacaatattaacacagaaatgttgacatgtctcttttagactaagctcacaacggaacttggtaaacctaaccaaatttaactattaccaactctatcaaaacttcaattgttaatagctgcttatcctatacactacctaataacatagtacagcttgtttttagcttattgttaaaaagttgtatggtgttgctctgaaaagattctgcatattatctcaacaaacgttatcacaaacttctaaaggttgatcatttacctaacaatgttttccctatgttatcaaagtatatttgaaatgagttttaaacacatgcagattatctacagaaaaattacctgtcatacaactaaaaaaaaaaaaaaaacctaatcaaaaaatgggcaaaagacttaaatagaagttttttctgaagaagataaacagatggctaactggcatatggaaagatgcttaacatcgctaatgatcagagaaatgcaaataaaaactattacaatgaggtatcacctcacatcattcagaatggccatcatcagagtctacaaataataagtactaaaaaaggttttgagaaaagggaaccctcttgtatactgttggtgggaatgtaaattggtgcagccactatggaaacagtatggaggttccttaaaatacaaaaatagaactaccacatgattcagcaattctattcctgggtatgtatctaggaaaaaaacacccctctaatttgaaaagatacatgcaccccaatgttccacagcagcaccaagttcccaccaacagatgactggcttaaaaacatgtggtaaatagacacaatggatctttgttgttgttgttcagtcacccagttgtgtctgactctttctgtaatggaacattacatggacataaaaactgaaatattgtcattgacagcaatgtggatgaatctagagagtgctgagtgaaataatagaaaagtatggatatcacatatatgtaatctaaaaaataatacaaaggaatttatatacaaaacagaaacagactcatagaaaacaaacttatggttaacagaaaaggagctggagaggggaagggacaattgatactgcaagatacaaggtatctctgtaataacataataataatggaatagaatttgaaaaaaaaaagcctggaatcactatgctgtacacctgaaactaacacaacattgttaatcaactatatacctgcaatgcaggagaccccagttcgactcctgggtcaagaagtgccactggagaagggataggctaaccactccagtattcttcggctttcctggtagctcagatggtaaagaatccgcccataatgcaggagatgtgggttcgatccctgggtagggaaaatctcctggaggagggcttggcaacacactccagtattcttgcctggagaacccccatggacagaggagcctggtgggctacagtccttgggatcaaaaagagctggacgcgactgagcacataaaaaacaaaaacaaaacactcccacaaaaaccaacggccatcttgtctgcgaattctgttccacaagatttacaagccaacttttccattattccaattattctctgaatcagttccttatcatatgtccacgtatttttttcttctgaaacaaaattctaaacaaaatgataagactagggagtgggatgttttcaacaagaacatcagtgataaattctgctacagaaagctctgaagagccagctttattccataataaagccaaacttctactattgtcagagataagcaaatctctgcaagtcaagaggcacaaaattacaaccatcttttaatattccaacccctgttataaatagcataacacagtcagatgagtcatgagaaacctcaaaatttacttctgttgccctggtctgatacgtctcttccatacagttaagaaccttgtttcaaatctttgtccacttctttagacagacctctcagagaacaagggaatgatcaaaatcaaccagattaacattaccggttaaaaaaaaaaaagttaacaaggtactgtcatcatatgatctaaagtctagaagataatcataccaataatcaagaggtaaaatacagaacagtttatatagaacaatatccactgggactaggaagggtggcaagctccctaatgagatgtggaactcaattcttcttcagagtaacatggttcaagactgacaacctaagtggttgagggcagtaatgtcaactcatacgttgaaagtactcataaagtttaatttgtctgattttaaagataaacaaaaggcacttccttagtggtccagtggctaagattctgtgctctcactgcagggggcccagtttcaatcccttgtcagggaaccagatctcacataatgcaactaagaattcacaagctgaaactaaaagatcccatttgtcagtaaaaccaggagcagccccccaaaataaataaaaatataaaagtactcctgtttccttcctgcactttaaagtatcattatatgcataccatctctatgttgtagttcttaaaaagtaactctagaaaggaggggggtgggcaggggtgtctgacttcctttcagtggtctgaggtaaaaactgttttcatattaatgctaagacattccttatccttaatctcacaagtatacagtggagttttccaaaggctacctgacttgtgtaacagctggaaagtgaatgaagtatatacaagaattcaagttttattaagcctaagtttaaatgagatctgcaaacagataaaaccatgtcattcttctcactaggtttttttttgtcttggaaatattatttttcattagaaatgttatttatgataacatgtaacaagtttattatttttaataaatctgtttattggtttgaatttctcatacagtaaatatcaagatataacccatagatacagaaagtctctgtggtccttaacttctagagcttgaaggagtcaaaatccaaagtttgagaacagctgtccgagagaaactcttacacagagacatgtctgagaaagttcattgattgcagtgtctgtcagtaacaaatgagcaacaaacgttcatcaactggggaaccagataaaattcggtttattcaagtaatagaatattacacaatgatcagaacgaactatacagttcttaatatacagcattagtaatttttacacacaaaacatcggggaatatgtatcaaaacagattttatacacacacacacacacacacacacacacacacacacacacacagtttagggaccacagagattgatactaaattcattacctgattgcttctgactgggggatcagtgggggggtagaggggtgggaaagggaggaacagaagacatcataatatcttatttttaaattaaaaacacctaatagcaactgtcaatgtttgttatatcctctgcactttttctgtactttaattaaagatcttacaatcacagacgctgcaaaaaaaaaagtgaggatgagggaagagttattctttttgatttagagaagactgattaaaggctaaaaatacaatcaatggatttcaaaattccaatctataatctttatccatgtaacaaaccttcacaataagaagtgtatacatatagaacacaattaagtgatcactgatttttaaactcatctttccattctttacaacacttaatagtgtcttgccatgaaagttctcagaaggtctttaaccttatctttagcttcctctttttctgtatcacagatacatactattacctatgcttcccatacgtccccttccttttatccacaattttgttctaagataaccaatccctctagccacttgaattatgcttttttgcacatcctctctctcaacatgctctagcatctacgcccatctaataaagaccagggcttgaacaccacttacttaggttaagaccttatatatacaccatcaattgctctttattcccttcatccttgaagagacttttccccacaacaccttacaaccaaacttctaaaacataaatcccaaaacacccagctactttatatttgctacctcttacccatatctctcccatcaccattcaatcttaaactgcagatcccatatgctcaaaaaattttgtggccttttgtattacttaacctatgaccattcccttggtattatataaaatattattttcaggcagtaattacgatgggaccatctgtatttaaacctcagctctgccatgaagtagcagtatgcccctgggtgaattactatttgatttctttgaaatcgaaaatcagcattctcatctataaatggatgtctatgcaaggttgaaggagtataaacttcaatatgtacatacaaagcacctcatatgctatagatgcttattattaattcatttcgtctccccctctcaattttctctagggcaatctgagagtgactctttgatgtcttcctccatctctttgttgcctccaagtttgagtccaatatgatcaactgctggccaaaagtttccacatgactgtttcaaacataaactattcaaaatcaaacatatttccccctccactaaatatacttttgaagactgcttgatgtgtcacccctctcccagagcttagatgtccaggggaaaaggtgcttataaatctaccagatgtcaaatccagattcttcagatccacatctttctcctcctctctattccctttatagatatgccaagttcagattctactttcttctcccacctcagtcccaaacctgccatgtttccccaaacctctgccttctacaatacacactataaatcaagcagtattttgactgtattactcccctacctaaaaccttcaatttatccatagactgggaaaaaaagaaaaaggaattcaaaaacattagacagacctgaaacttgtcagtccccaaactacctcaaccatgctttcagtagcctcaggagtcaaactactgttccttatttcacaccaatgttgcctttgaattacttttcctacaccttcggaaattctgagactgacactctcttctcccaagtctaatgccccatggccatcccacagtactttaaaaggaccccaaaggaaattgttccagcatacattaaagttacttgtctaagttttgtgtcctctattagtttaggctcctagcgggcagatccttagtagcagtgccatcctaattaggacacagctttatagctaggcaggccctcaaatatttgtaaaatgaagatttgggagatttaaggttacaaggaactaatcactaacattttatgaatggggagaattaactgagaagtactacatcaagcagggacacggagatggattttgaagtcagactaacttctccagaagaaagtttttggggaagaaagtttggcagaaaagagctggaattggtagcatacacctaatataatgcagttaataaagactaggaacagaaataaaaattatttaaagaggaaaatgatcgatgataggaaaattcttactttgtacattttaaaagattaaaatgccatttcctttttcaagaagacactatcattcctaatcttggttttcaaagtaaaaactactgatcacattttcccagaattaacgtgatactttatttaataacgtgcttaatgtccataatgcctcaatcataattaaataattctggtcttaagaatatgctaaaacccctcctctttgttcactgaaaacatccagaaagttttcatcttgagaaagaaatgtacctatctttcaaaacattgtgtcatttgtatgttatgtacctatcttttaaaacattgtgtcatttgtataagttctcattcattcaacaagttttttccaagcatgtgctatgaggaagcaaaggacagaaattctccacccccatgaagccaacattccagtatattttgccttcaggaaacaaagtcaacttccaatcctgaaatctttggagcattatcacaaactccctagccatcaaaaaaaaaaatcaggaaatactatttcatcattttgaaaataggcaatacagaactttaaaagacactgtccaactttctgtatccatcagttaaagacaaatcatttctaggataactgacaaggcaacgaacggtcctaactgcagtgttactggaggcgctacaaagtgaaagttactgcaccctaattgttacaagtgaaactaccaaatcacgttgtgcagggtgcacgaagttattaacgtggtcccaaggcatctagcactgctacatctgtttttttcagtgtgggttgatcggtggtatttggaaaaggaagataatccaactcaacatagccaattgtttccattttgtaggtacgtttgatatcaatggtcaagaccccttcccctgaaacggattctgaaaaacagaatctgtggactcgacgcttcaaaaacagcacctggaaggttttgagataaaaccagagagctttagggcggcaggcagctttgttcccggttttgggaggtttttcacatgtaaatgttcccaaagaagggagccaaggattaaccaaccgcgaggagggtgcgagggtgggaagactggaggccaaagccggctttctagcggtctaaggcggagcaaatgctgtcctctcccattcaactttttaggtgtcacgttggggccacggagcccgtaacagggttgagttcacgactcgggaggatgaagagccccgtctattaactccatttcccaagtgcaggaatcccgaagggaggggggatgaacaccctcaccaactccgccccgacccgagatcagagtccagcagccggcgcgccgcgcggcccgagcaacaggagaagcccaggccaccgctctgccgaccccgcgacccgcagatgctcccggctcccccacccccccacccaggcccgcccgcgtttctttcttagccccttgcgggctcccggcaccgcgaagccaataacgggagcagagggcgagagcgcccagacctgaaaagggtgggggggtggggtggggggcgaagttaaaggcaccggccgccgtcgccgggctggacgaggccggaagggggcgagagggggcagcctgaggtcgccgcccgggggtgggcggtgggggaggggtgtggggtcggcgcccgggccgccgcgacctccccgggccacacaggcccgctccgcgcaggcccgccgccccggaaccggggcaggaagcgtccccaccccgacctaagctttaaacctcaggcggcgggagaaacgacggcccggctccccctggaaggcccccgagccccccttgtcccgatcacccctcacctcttggttgaaggcgttgacggcgtccatgttcgcgctgcggcggcggcggcggctgctccgggcccgccggtcacataagacctcgcgccgcggcggagagaagctggggaaccggccgggccttgaggggccggcggacgcaacgagcggcggagccggaggccgggcaggaagaggctgcggccgaggcggcggggcaggcggctgaggctgaggaggctgaggggtggcgggccccctctcagtcccgttcggaggatgaggaaaaagaggcggcggcggcggcgctgggctccaacatgtccgttcggtggcggcggctgcgctctgcgtctcgctgacacggccccccgcgccctcacgcactggcccacactggcccgaccggcaagcgggcgggcctctcctctgcctctcgccagcgggatggcggcagcgacccgagtccacgccgcgcggggcacactgggacggctccggcctcccagcgcttcctgtgcccggctcccgccccgccccgccccgcc

SEQ ID NO: 242 - DNA, 71774 bp, Hippotragus leucophaeus
  source 1..71774: mol_type = genomic DNA
gttcaggaccaaagtgaagccaaagacacaaaaaataaaactttaaactgtgagtagcctaaaaaaaaaaagactacatacacataaataggattacacactttaatctgatcaacatggaggaagttgggaggacaaaagaaactgagtttcggctctgtgttctgtataaccaaaggctccttgtccaaagagcaaactgaggtttcaaaaaccagattttatcagaatattttgggaacgcatactatgtgtaatccaagaaatacattatttgcaggaaataggaaaatcatcaagggcaataaaagattaaaacaaaagaaagcaccagggttttgagcaggtttagtaacatgaatacatctgcagaaacaacataaatggttttgactggctgctatggaaacatgctaatgaggattggtccatatcttatcatcgtttaaaacatgtttctttggaaaaatggcgatattggctgaaagtaaagccgtcctttagacacccagcttgttggcctgggtgagaacaactttgagaactggcataaaagcggaggtctcactgaagttgctagtactaactatgtgggtgtgaatagtcaagccttctgagtagtttcgggtctcgatgctccgggcgatgttgtgtaaaccgttgatgattgttggtgaaagctgaaatcaaggtggaatagagagagaattaaaggagaatcttccatgagacccgctataaaggtgaaaccctggcatttactaggagtttgaaatacacattattttttaaaaaatgaataaactggtgaacatttctagaaagtttctcagaccaaacaacacacaagttataaaatggaaccacgacacaatgatttatgtaaggaattatttacgaactacacacgtatgatcagccaggtattttcttaaagaaaagcagccagatctcctcccttcaattggaaagttaattgccgggagccttaattgccgggagccaccacgggagatcccacccatgacaaggtcatgaggaagagaactgttaagcaaggcttcagaactcaacgggctccctaggttttctcgagcatctaccccaaaaccagaatctgtctgttttactatttcatgactttcaccaactcctctgacattaacaggggtctattcctgatgacccttctctggagaaaatcaacttagggctatagctaataagtctcctggacatgagagaaatatttcaaatcaagcccctctgttagcattatagcttgcttagcaggtatatccagactcttgcagctacgcatatgattatttacatcctcccaattgtgagaggcacaaaaagcctaaaacatagagcctttccaagagttaaaagttattagagtagtgttaatgtaggattccattattgggccaatgcttgttgctaagttcccatatctcttatccactgtgcacctgggaatgcattagttaacatagttggaaagtaagaaaaacaagtgtagccttgaaattaaccacatcagacttttgagctaattggttctttcttgtaactcactgcacctttgcttcctgagaatgtaactctgtttaatacttttcgaggctgacacagattagaaatataagaaaaaacatttcaagggaaaataagttttctggttgagaagcctttatcaaaagagggtcataaaatgttcacaggcctccaaggacagaagataatgtacacaatattgtttatgggaaaggtttgcagaaaaatcctggtttctataaagacaaaacagatacaatgtttgggctgactctgtatgactttgcatctttcatttccctctatgtacaagtaaaggtataaaagacccttttaaaaataaaaacaatgggcctcgcttgaagaagcttggtcaccccgtgttttttcttttttctctttttttctctcttactttctttttcaggctgatcccttggagcatagaggctccctgcgttcacttatctgcccggggtctccaagacctgaacgggaagacgttctgcgtcttcactctcttgggagaccgggaaggcacctgtggcctccgtgaacagggcaaacttcttgaagttttattggctttctatgtaaaccaaggaatatcagcctctttctctcctctattttcttatctacaatattctttccttatctctctaaatcatccgccgacgccgtttttccctcaggttctcctggatcctgcggaggctggaccccggcagttaatgtctttctccacttaacagctttaaatcttcattactttagatatagcctcacacctctgaaagtgtttcctttgtacatgaagaagttagagagtcttaatcatgacatcctaaagtaggggcccaatttactataagatcttgttgacaacagaaactctgtactcctggtccactttcatcaggagggcaacactcctcattatggactcaatttgctcattcttaactgctttttagtcctgtcatctcttaaaatcataagacctagagttgtttttcctctctctatcattacttggcttccatacttttaagagactttttttttggatcagtccatgggctacactccctttccactgctacagtaattttctctggttggggtctcacgctaaatggttatttttatctgatgggactgatatggagaatggggaagaggaatgctaaaatgcaaaagtatgaaaaactccaattttttttttttctccccaagtgttttcattaaaaaaacaaaacaattctggagaggcatggagaggtggcaggacagagaacagaagacagtgtctgctcccactgctgactgtcttcgcaggcacacacactgacccgctccacctgtggctgcatttggcgttgcctctgggtaacagctattgtcaaagaaaagggtcagagtcttaaggctacaagaaagatgacagatttggtctctggaaaaacagagtatctgcccactctttgatttcttaattcaaggcacatataaatatgaacagaaggccagtcaccttagagccagtgtgggccagtttatattctgttataaaaaggcaaaaacttctctctcacacacacacatacagccctatgcccttatccccagtgactgaaacgtaagatttagacagagcaaagctcagtctgtaaccgtcacggtcattttgcccccaaacacactccatactacgtactacacactacatacgataccctacacgctacatacgacaccctatctatgacatgcaagtgctcatcagatacatatgactagcaaccaggagtaaatgcttatcataaacccttctttccccacgaacttactgtctgttccctaagtttatcatacagaaactccaaacgtttgctggcatcatctagcttcctcttggtttgctgcaggagagaaaaaaccagagatgctatatttgaacagtaacttttatcccaagaacttaccccatctcatttcactaaaccttataatcatggtgttgaacagctttgttttataaagaaatggcaataccttacaccagggaacttgaacagatgattagaacagagaacagttatctattgaggcagggagagccagaggtgtgcacaaagggaccctggctggatctcaggggctctgcgacacacttgaggtgtgtgtgtccaaccacactacgtccacaagcaacagtgagagccacctggaggcagcaatgggtcatgcactacagaaaaggaggccgaacagttactgtacattaaataaggcgaatattacgggagctagaaagcaaacatatgggtgagctgtgggatctttttttaacctcaagaacacactcaatcacattgggtacatttaatcctatcttattctgggcctttaaaacaccaaaaaaagaaaaaggagaaaattatcttctgacgccttaagattattaagagggaagtgttaaaaaagagttcttaaatgagtcctcctatccttctccagtactctaagtatagtgagggaaaactagtctaaaagtttaaaatcatactgtgattaacttaatgatctgcattatacctagaagtgatactctttttcaatatttattgaatgcctactgtgtgccatgctggggatggttttgtgtctcatggagctcatattctattgggtgggggaaaaggtaactaaacaatatgctgcatgtcagctggcgacgagcagcatgaagaaagttcgcggggtaagggcgtgggcggcgccagcagtgcgaggtgctgggaaggtccgaacggctcacgggacacctgagctggcgctgggaactagtgcgcaggagccctgccattctttggggaagagccccgggcagaagcggcaggtacaaaacctctgatgctgatggcctcttgctgtgtttgaggaaggcacgtccgtgtgtcagaagaggagcgaggaaaagctgaagccatcgaggatagccttacaaaccaagccgggctgtaacatgctgtaacgttactttgtgtcgcctggactgaactgaagtgaaaataagaacaaagccttaccataaacaggatttcgagtactggattaaaatggacttttgtggattaaaatggacttttgtggacggttcaaagttctgggcagtgtcagaacttcttccccaaatactgatgggaacagcctgtcttctgcctggtcctgggtcaccagaaaggaggtgacagatactgtgacctggaggaggtgaagctcagcaaaagtgtgctaagccaggttgtgccctgccagcttctatttacactgactcacacctgaaggaagactggagttttcccattaggactgctccactctgcatgatggtgacctctctgtttcaaggtgtgcccaggagacagtatacacctccctgtttatcagcttcacctactctctgttcctcgcctggtccttccataacttccagaatgccaggggctaaggtttatgttaactttcccctgtctttgccctcctgatactactgtctgtacagggaactgcttttcaaaagactagcagagggtggcacatattaatactcaacgtctgatgaaacagcaaatcccagaggctgtgttttcaagcagacaattggccgtgactaaacaaacacatttgatgcttgttggcagaaactgaaatttcatctcgaacaacactggctttgtggaatttttgttgttgccaatacacagacatcctctaataaactaagtcacatcagtcactttgactatgaatatgattccaatatctaaaacactgaactgttaaggactttgcaaagttaaagattgtctatttttaaaagcttttttaaaaaaaaagatgttttgatgtggaccatattaaaagtctttattaaacttgttataatactgcttctgtttcacgttctggtttatttggccatgaggcatgtgcgatcttagctcccggaccagggactgaacctgcatccctcgcactggaaggcaaagtctgaaccactggactgccagggaagtccctacttctaaaacctttagacatacactttgaaggaaaccccaagtctgagtttcttgtattttagcattctgccctattcttgtgccagacatgatgtctgccgaggagtcagtgcagctcaggggttgagaacatgaattctggagccagactaggtctgaatgctggctctgcctggattatattgtaactattttgtgccttaacttcctcatctgtaaataaatatggcaaacctacctccatgaggtgggtttaaggattatataaaaacaactgagtatgcttttatatgtaaagcaaatcatacataaatgctagctttactgcttttgtaaaaactttcaaaatacatcttgtaagactttaagcaataaatataaaagagctccataatggaatcttttaattaagcaaaataaaaaacacatacaggatctgtggctgaagagaggcagcgctgaataagatcctcgaacgtggtctttagaatgaggtgttcatctggaataggcttcttggtaattttttctgttggcaaagactgcacatgctggaagaaataataccattaaaatgagcagaaatgaccagaaactacctgtatacaaagtcctgaatctgtcataaagagaaaacaactaatttatagataggccattcaaaatcaaacaaaaaatgaacgcgtggaatcacctcggataagcaaacagaaaaatcagatattcaatagaagatacaggtagtcttcctacagcttctactttcaaaagcagggtcgggtataaagtatttgtttaatcatggaaggtatgttgatcaggactatatataactgatgggcaagaggaccttgccagaaagaaacaaagaaccaggcgtttataaagctcgctggtgggggcgactgcttgctttgcttgttggctccttgtttattccaacagtcttgcattctttgcttgttggctccttcttgtttattccaacagtcttggaggttcattaactggtcttttatcaaactgtgagattaaatcaaaggttaggatagaagagaccatgacctaactgaatgcataagatggataaacaaagaaggaatgtgtaagtgtttaaagttttgattgattatattcattcatagaaaatatgaggcaattctgtactaggcactaatgaatcaatacagaaataatcttctctctcagggagtttacaggctgctgctgctgccaagtcacttcagtcgtgtccgactgtgtgaccccatagacggcagcccaccaggctcccctgtccctgggattctccaggcaagaacactggagtgggttgccatttccttctccaatgcatgaaagtgaaaagtgaaagggaaatcgctcagtcgtgtccgactcttcgcgaccccatggactgcagcccaccaggctcctccatccatgggattttccaggcaagagtactggagtagggtgccatcgccttctccaagtttacaggctagcaggagggaaagtttaaaaatgtcataaatgtatgtaaaatagcaactgtggttaagttcacatcactggaaccaacagacaatataactgggatttaacgaggggaaggctctttaaggaagttttatcagaaggttaagtaggagttaaacaggggaaaaagtgaattccagacagaagaacagtacacaggaaagatcatgatatagggactgaaaggaggtcagcttggcgggagcagagagacaagaaagaggagtagagcggagagcttccagataatacgaaaaatgttggtccttatcctgagaacagtgggatgtggtaacatgttaagcaacaatgagctaagaccagagaagagatgggtcatagcagatgctggcacaccagtgagaggctcctgcactgctgaagactggagacaaaggtagcatggactagactggaaacacggagaaggggtgggagagagactttacagcagtatcagcaagatgtggggataggtctgaaaacaggttaaaagaaaaagagtataaagatgcccaggtttctggctggattaaatggaaaggattatggtagcattaattgaaacgagacacaccaaaagacaactaggtttgggaggaagactatgagttggactttggatatactaagtgtgagatgcctcagaaacatccaagtggacagggagctgggtatcatggcctggctgaaccacacacatccatggcgctctccctctccatggtaactgaagttctggtccaaatgagtgtagcacgaactcccaggtcccaatacaaatgaatggcttcacaaatggcacagacttgtaatcatggaaactaacaatgcatataagtgtatcttcttgtgaaaagaagcaggtcctcccacctccatcagaacactggagtttataatgttactgttaatatctaggaactctcttaacagcaaaacaaactcttgtgatagacacaatctttataaatttgacttcaatgactcaaagacaaggacagaagaactagttttatatacttgggcaggaatttatttcatcttcttatgttgaactgtgacccaacctctttatttttcatgaatagatcaagattaccttttatgcctaagtcagttacatggaaacctgataagattttttcattactgagagccctgccaactagctgcttgttgtgaaaagcaagtatgaactgctatctctatccaaagatatggctatattattagctcttacacacacacaagaaaagatcgaagtcattatatttttatcttacatttataaaaccctttggaaacagcttctgctgagcagccttggatgccaacatggattcaactgatcttaaattgtggctactgatcagatgaaacaaaatacttcaattgccaagctactattaacatatactagtaaatacataaggcctttctagaacgtttgcatatggcgatatcactggaaaatactgtacatgtgtgatcttaaaaaaaaagttcttttttacttaagttgtctaaatgaaaatcaaactgagataataataaaggtataaccacaaaagttaacacgttgaaaaaaacacactgaaatagagccatcccccacttccacagattcactgttacctgcatggtatttccaatgggagccccaggggcaccttcaatattgggctttgaaaacgacggaggcatgcctggttgactgaggggctgctggatgccacggaagggctggccaccggcgaggtgcggctgtgggaatggagcttggctgggcagcggtactggtgctgaaggctgctgaggcagcatctgtgactgggggtcacccaaggggttcatgattggcgatgtgatgggaacaggaggcgtaaagttctcaggcatcttttaaaagatggacaaaaggtaccaggagtaaggaaaaaatgatataacaacatttcctcagctttaaatacaggagttagccatctgcagcaagatgagtgtaactagagattatcatactgagtgaagtcagtcagaaagagaaagacaaatgccacatgatatcacttacacacagactctaaaatatgacacagatgaacttatttacgaaacagaaacagaatcatggacatacagaacagactggtggttaccaaggggcagggggctgagcaagggatggaatggcaagctggggtgagcagatgtcaacttttatatatagaatggacaaataacaggggcctactgtacagcacagagaaatatattctatatcttatgataaaccataatggaaaagaacatatgtaagtgtaactgaattaactttgctatacagcagtaactaacacaacactgtaaatcaactatacttcaattttaaaaaataaataagggagttagatcattctgtggttaaaaaatttttagtaacagtagaatacttttgaaaatggatttttatgcagaatcctagagtaaaacgtaaaagtaaagctaatctgtctaagagggttggagactcaaacctggatctctcagtctcccctttgccttccacactcatcccataatgggcctgaaccaaggcattgttgaaggaggatggagaattatatttagctatactgggataagaaatgccaaaaatgtgtatgtgtgtgggtgtgtgggtatcaagtaatcagatataatacctttttctgagaccattaagtgatacctacttagtgatcaatcacacccagcgcagtagaccaagtttctgattatcactgacataattttggggattctgttcacttagtatctcccaattttatgttctggcttctcattactgtatttgggggacagaaatcactaggagtaaagaaaaaaaaggagaaaatggcttggggtaaaagaaggaaagaagaatcttatgctatgctcatgagctcagctaacaaggctatttcttttcatatcatatgtgatagacaaaaatagtccaaaatataattacgaattcatgattactgctgggacccaaaaccaaagtaactcctaaaaaagaaattcatttgagtaacctgaaattttgtttcctactctttgaaacagacgttgggaatttacatcttgtcttctaaaaggggtttaattcataccactgtactgttctgtattttccttcccttcatggattagaagatttaagttaaaatacacgttattaagtagagcagtcagtaagctttgcttttaaagaacagtgaagtgtggtgtgcttcaggtggctacatgattgagaggacatctgggggcaactgaatagacatctttttctagtaccttcttcttcttgggtcctctgttcaaagctggtggatcattccaaccattctgaggacctgtaacagataatagagagcattttcctctagaatcctggaaagagaaactaaattgtatccatcatataatatctttaaattctaccttcaccctgagataactgtcacaaaagttttaccagctgagctgctgggatcactatgtagccctggattcacaaactcattatcaaaccctctggtaatcacagggccctggcttagaaagcaggatatcttgatattatttcttttaaagtgaaatagctgtgctaaatttaagggtagtcaagcttttatgtctatattggtacatgactttcaaagatcaaacaattctctctcaacaaagaaaaaataaatcacctgaatctgctaaaaaaaagtgggggggggttcctgatgtattcaacacacacaaaaaagaataaaagtagcaatctcctatttcctaagaaagcacttaaacataagcaattcaacaaacgtaaatcacccgcatggtagaaacattgttaaaaaataaaaaacagcccaactacacaacaccagtatgttttactacctttgagttaagaattatcttaactcaaagtagaaaagtgcattcaaatatctgtagtaagatatttttttcccctgccacatacacaaaaaaattccaggctggcagcaaatttaaaattaaactactgtcatctttgataaattttctccccccaccccaaatctcccaaaacctctcatctcaaaatgaaacaagaacatcagtagcggaactcattaaggtattgaatacttaactgcctttatctttaaagaaaaaaggaacaagacatgccagaagcaggataattactaaatcacaatataatcattttacgttttattaagttttgtgtatgtgtatatgtaaaagcaaaaaactcttctttaaacaaattaaaattctttcagcattttatttttgctcaattgatatccacaatattaaatcacaacaaacttgcttcgcaaaccaaagaacataatgtcatagaaatttcttttaaaaaacaagatcttctcctagccagcatgaactcatttgccttgattttaaaaagagaattacttttctataagtcgactaggagacagaatgccaaatgagcctcaaaacactcaggaggcagtcacaaaatattaaaccacatgttgcaaattcttaaattctgaaacttctggttatacacaaactagtcattcaagcctttcccatcacattctaatctttcttatatctaagacaatattggtatagccttgtctttatgtctacatccaatatataacttttttgattcaagatcatttgtgtcactatgttaatttcatcagttctaagatttgattcaattaagaagccaaatttaaaaaatgatactggtcagatttaggatatcattgctttgaagttacatgcataattgttaatgtccattcattaattatattcaatgattcgaagatttccaaatatacattctgtaactaattcaccttccaatatagatgcctggtcttgcattgactgattttctgtagacaaaatgtaaaagtcacttaaacagtattatcatcaaagactttctaaactctactcattttctaattgtttctgctccctctgttgacctcaggaaagaacaaactacttttataaggaaaaaaaacttacttttaaatcaaatcacatgaaatggtttctatctaagaaagtcatcagtttgtaggcaaagctcattcatttaaatgtgtcaattagctctcagacacttttattctattatgccagctgtttctttaaagagaaatttttgttcctttctgtttaagataacattatttccccaactgtttgcatggattgtttttctactatttgatcaatgaaactcagtaataccatggtgcagggagggaggagagcactgcctaacatgttgtaactgtgtcccttttagcattatttaaagcttgaatccaaatcagctgaggaccttgtaaaaatggagattctaattcagtaggtacagcatagggtctgagagtctactgtctcggctagctccaagaaatgccaatgctgcgggtccaagccctttttaagtagcagggttttacaaagaaacggggggggggggggaggggtttctgccctgttgtgcagacttcagcactacactgctgaacataatcagcacgttagacaaccttaacgagggggtactactttgctgctggatctgggaggccccaaaggcctgcattctggaggaactgtaatttctggggtcacaccatgaatgtgaacataaatgggatcaggcccagagagcgtgtaaccatctcatattgtcttttctgtaagaattcacagatgtgcagactgtttagcacaagtcttccttaaaagaactgaaagttctggcagtggacaagaggaaagaaggctggaaactaacacagcaactctgtcagcaaaactgtcagatattcagggtggggccaggccccagcctccagcaaaagcgtgtggtgaaggtacataacaggcacagacgactcacaggcattcaactgtcttcactcggagaagcgaccctggtgcactgctagtgcaagcgtagaggcgcgccgccactgtggaaacagtgcggtgggtcctcaaaaattaaacactgaattactacttgagccagcaatcccacttttgggcgcataccccaaagaactgcaaccaggagctgggcaaatatttgcatactcctgttcacagcagcattattcagatagccaaaacccccctgtgcagtttataggggacaaaaaaaatgtggtatatacgtaagggtggatgcaaagcaaagaaccaccacattccgtaaacatttcagcagcagctctaaaagctctgaagatgcaaattgtttggtgatttggattattattcagctttaagaaggaaattctgatacatgttacaaacatggatgaatcttaaagacagtgaaacagccagttacaagaggacaaaattgtcttctaaaatgtcctctaaaaatgactacttacatgagctacatggaatatatatagacagaaagtagaacactggtgaccaggggctgggaaaatgaggagttttaaaggctgcataatttcaatgtgagatgatgaaaaacttctgcagttagtagcgatgattgtacaacaatggaactgcactgaatgtcacttaaaaatgatgaaaatggtaaatttatagtctattctacattaaaacctttaatacatgcacacatacacataacatatgcatatatgtgtatgaagtgaacaaatgcacctaaattatcagtggtcatataagggtggcagaattataatttgatttttatgttatttgagttctttcaaaatcctacagtaaaaaattaataaaaaattaacttaaaaactgagtgtggcatttcactggatactgcagacccctatccaccttagtgtagggatctgtcctccacacagtctttggggaacagagaaccactcagtctcacagagagaagtggaggtgctaccatccatacctgaatcctgcttcccactgggaaccttatcaggtacaactagaagaacataatggcagcatctatgcactggttaaggtatttttcagtgaaaaaatactagtgccaatggcatggagacttctggctagaacataatttgagacagagagaaaagagcatcctcataaccatatacctcccccttcccctgtaagctgagcatgtcgcgtttttaaaagagtaacaaaattcagaattaaaattgacaaagaatgtatccttgtgttcattttctaatgacataaggtaaaacagaattagccggagaaagtaaggaaggctatcatgctcctttctgttgttgaaaaggttaaaaaccaggtacctaaaatttcttgccttgaaatgtaatgattttcaaaatttggccccaatacaaattttatgttccaacttacaacaaagctatgtgcaattcactagaaatacacgtacttttctgccttcctatctctgcctggagtaattctgatcatagactgaatgggcattcaaaaagaatttagtgaatgagtgttgtgatgatttcaacatgagtttctctgagtagcaggcgcgtcactttgtggttcactaacagaggctagtgaactatcaagaacaatttaccagcggaatttccaagtcctatagaaaaccatgatataataatctaagatatactggaacgaaggtaaaacttttagtgacaattatctgtataacctaagcaaagttttcaggaaatcaaaaaataaggtaaagctctgttaattaaaatatacagactattaacatgcaagagataacacagcagccagcttagtacatactgagtattgcttcttcctattagttactctgtttctcagccaggttagaacagttactttgcacataagcaagtactttattatatggctgaacacacttcagctcaaggagggaaagaataccatgcaaatagttaatttagatgatgaggtaacaaatacttaggagagccatgctaaatgttcctgcagttccaacactgatagctatttcagtctcttccagtgtgtgcccagttgctcagtcttatctgcctctttgagacttgacggactgtaccctgccctctctttcagaatttgccagtcgtgtctgactctttgcgaccctatggactcacagagtccaggttcctctgtccatggggttctccaggtaagagtactggagcgggttgccatttcctactccaggggatcttcctgacccagggattgaacctgcatctcttgcactgacaggtgggttctttatcactgtgccaaccagactatctggtaaagaatgaacacaggctctggagacggagagacctgggtttgcacctcaacttgaagatcatgaccgtgccatcatgagaacattatgaaccctaggaaactcaagcttcctcatgtcaatttttaaaaaattaatgattcctatttcttatggctatgagaactaaataagaaaaaagatggcaagatggcaagcactggtacatgtccactgtatgttcaataaatgacagtttgatttcccacttctctgcactacttccttacttgaggatttacttaaatctatctttcactcactctattatcactcaaccattcagaatggatactgttttcactcatcccggtttaatattttttttgaactttacaactgaactaacactcctctctaaatatcaatctgaatgttctgtattgaaaattatatatattttatttgtgcagtaaagggtgatatatattgtatgatttttttggtagtttgaatatataccaaaaaaggagagaaagagataatgtgtataattctggatccataagacatcaagaaaaaaagtacttccttaataaatcttattatatgataagtgttttcagttactaaagctactgcttagcagataaagagagaaaatttatactggaattccaggagcaactctggtatccgacagcaagactcactcctgttttgtccctctagttcaaagccgtcaactataatcagcaaaggaaactaatttcagttaccaaaaggcacagagctctaactgtgagtgtggttttgcgtaatcacagctaactcactctgtggtcactgtccataaacgttttcaatgtattaacgcactcaaccctttgcataataagcttaggagtatgtaccactcttattatgaggaaactgaggtttaacattaagtaacttattcaagatcacgtaactattaggaaagagtgaagctgggatacaaacacaggaagtctgactccaaagcctgcattctttagtatgttagtggttcttaatcccaattaactgatctcttttttttataatacatactttataggccccttttacaattctaatatgaagatcagataatgttacctacttctgaaagatgaatataatgctttaattgcaatgtgagagataaaaaagaatttgggtatttcactataaaaataatttaaattatgattttaattagaaaatttcaggcagaacttgactgctaacaacaattaaactgcctagaaatttctaaaatgcttgagagggtagaactgtcctaatggagaatccctgtactgatgtatactgtctttctgctgtcttatgctcagtcatgtctgactctttgcaatcccatggactgtagcctaccaggctcctccgtccatggaactgtccaggcaagagtactggagtgggttgccatttccctctccaggggatcttcctgacccagggatcaaacccgggtctcccgcattgcaggcagatgctttaccacctgagccaccagggaagcccctaaaaataattcaaaattatggtttcaattagaaaatttcaggcagaacttgaccgctaacaacaagtaaactgcctagaaatttctaaaatgtttgagagggtagaactgtcctaatggagaatccctgtactgatgtatactgactttctgctgtcttagagattctctgtcaagagttgcattcttttgcttttttcttttcagtacacatgttgaaatccttcctcacctttacaaacaaaattacacaatgtgtatacctgcattatttagtctctatgaacgaatttaaggcacaaataattttaaaaactgaaagttcaggaagaacacaagagcacaggtctactctggtaaagaaattagtgtcagttaaatttagctccaaccagcacgtctcttgccaactaatttcttaccgcttattttaaatttaacggcagactatatactctttactcttttaaggcactcaagctttccctgcttagcaactaaagtttattattggaaaatcacattttgagaagtagttatagactctgttgtaaaattcaatcaacacctcacgttagccagtttacagttagaaataaataatccccctccatccacccatgtgatcatgaaataacaaagtggggggggggggcgccaaaccaaacccctttcaagcgcagacctgttctttgggatgcaggcagctcactggcagcaggcagtgtacctgttgttccaggaggcagtgcataagctgaagatgctggtggagctcctggcccgccatgctggaaggaagctccagaggaagggggaggagggaaagaggcggcagggctggaggtaggtggagaggcctggtgctgtgctgggtacagctgggactgcccagagtaggaagaagcagaaggaatgtaaggggtgttagggtaagcgtttgaggtggaaggagcaagaggctgctgaggtcgatacattgctgacccccctgttccgaaggaatactgctgggcgggttgataagctacaccaaggagaagaaacagaaattttaattagtgacaaatttaatcagacagcaatggaaaatccaagtgaactcactctgtggaaattttcaattcttctagtaacagtacgttacaaccaaacattacccacttaaaataatgtcatgcttttgatagtccagctgctctaactatatcaaaagtcactggacccaatatttgaaccttgctgtttccagattgctgctggctatgataatcaaaggactgaccctttttctgggacttctattcctgtgaaaagactgcagtgacatgtactagccaccagatggagccatgcaggaacgatacatcctaagcacactcctgtttactgtgaaagttaaggaaccttggtggccactcaagatcactcccaccataactgcagggtgagcgtgactgctgtgaaccagataccttcgccaacatctagtaaaatcataagctactcacactccaggcttgagcacagttccagattaacaggcaacgctctatgatccctgacaactatatttcttacagtatacaaagttggttagtaaggaatcaggcagtcaactaatgttttaatacaaagactggaactcaagataccattacccgtttgagggaccaggcccagaatgtgaacctccacagagggaatctaatagaactctgctcagcctactctgaagacagcactttcacactgagcactgactgaaaagctgtatcaaatctgtattcatgttaagtaggaacatacatcttattagcacagaataggctcattaagatccgtttttgctaggcaatatgttcgtgttttatagtagttggtcgtatgattttctccttttgagattttcatttttgtttaaattttaaaatagtgatgatgttttcccttccaagtataaagtttctttaaaaaaaaaaaaagccaattaagaaacatcattcttatacatttgtggaaattcatagaacatgcaaggccaaaaggtgaactactgaagtaaactacactgggcactaatgatgtgtcagcggaggctcactgactgtaacagcgcgccaccgcggtgcaggatgtctgggtgggggaggttgtgcaccgaggcaggaggcatactgtaactttctggactttccactcagtttttctgtgaatctacaactgctctaaaatatggtctatcccttaaaaaaaaaataaatgggaggtaaccacaagaaacatccctcggagccatttttccaaaagcggtttgcatcatcttgactaaaggaaaagtatatgtcaccaagtaatttccaaaattctattttttatgccaaaatcatggaacgactgactctctagcaggctcaggaatgaggcgggtgtggggggacccactgttctgaatgcagtgacatgggcgctgtttcccagcacattggttcagaacgcgtctcagagaaaccaagtttctctacatcaaggactcaagtcctacactgaatggctctttcttcacttgttaaaactggtttgatcatggctttggaactccaaggtaaacagtcactgctctggagaagacatgctgctgtgacaggacttcggggtcacactacttacgctgtggctgtggataagatggtacctgggtgtgcatgtgacctggagatgtgggaagctgagcggcggcaacatttggactaatatttccatgcattacgaagcctggaggtggaggattttctccctatgcaatgagaatacggtaaaaaggaggattaccttcggaaccaagaatcttaccagacggatttataatctctaaaatgaaattttaaaaaatcttatgtaaaaaaaggttacattctatgcatactgatgttttctgagcaacacattctacgtgatttaaagattagacaggtccaaagtaataacagtgatgaatggcaagagatgctaacagcctcatcaaatagtatcgatgatatttataaaaagtcactaggattttccaactctactaaattccatccgtatctaatgctttgggaagtaactgtacatgccacgggggaattttttttttcttctttgcaatgctaaaaacggggaaaaaaagaaaagaagaagaaaaggaaagggaaaaaatcttcagtgaaattagatttaaaccactgatagaaccctggttgatgtttttctagttcaagttgtgctaaaaaaaaaaaaaaacaaacctgtttcttgcctcccaaaagcactaaaatgcaataagcagacaaacagatgggggtgggaaactcaagggaggtgggtagaagatacataactacatacatattcaggtgagcagaactctgctcaaagagggataatgaaggatatacctgtgtgtcagagggagaggctgcaggtggatggctgggaagggcggtaggagttttgttactccaggtagtgacagtgggggcaattctaacctgaattgaacaaagaaacaccaatcacagaacataaaaaaatgaaaatgttaaaagaagaaaaaaaaaaatccccgaaggcactaacagccagatgcaaagcaagaaagagcagtgaggcagcagcacacactagccaggcaactggtttcagggcagctgggattccaaaagaaaacacaagtctgaagaggacaggcagagggagacagcagaaaaatcaatacgaaaacgaaatcaaagcacagagaacaatgccattcaagtgtcaggagtaagtggggaaaggtacagtctgtaagtaggcaaagaaagaagacattccggggggttgggggtgggcagttattgagaaaaaagtgatttttgaagcagtaattgtattcatgctacaattatatctgtggacatattgctgctatatgctacccttttcaggacttcattagagctacaaaaatcatgttagttctgtatgaggcttagagtcatacaatcggagaatattaaagatcatctcatctaatccccaccatttaccatggagaaaaaaacaagacccagggaaacgaaggggctggctgaggtccaggcaacttggggtgatggagctagggctgattccacatctcatgactcccagccagtgtttgctacactgcaccctgctacttataccctggagtccagaggctttcaaaatcaatttttaaagccatcaaaataatttttgtcaagtaaatctttgtaggaactcaatcacatcaacaattaatagccaagatgtgctggtggcagtcagaactcctgatctggcttccctttcatccttttactcctgcttgtaagcctgcctttaaaaccacaagccactgccctcattcagcacaccataagctttaatcaagaaaaactactcttagtttatgattgaacttgttttccttttcttaaagtagcagaccactaggtcaaagtacaacaaaagtcttttaaggtttccatattttccctgaaagacagataaactcgaggactcagggagtaaaattgtattctcccaaagaagagaatgccttactttggtgccctgagaggtcgaactcaaggtgctgagctgaggagttctaatcctgttaactactacctagctgacaaattcatgtcttaaaatcctgattagtgactggcttctccaccacctctcagtttcccagccatcacctgacgtgccctccctatgttacaggctttctaagactagcagtgagagtggggaatttattgttttgcctaccaatacaccctcaacagggagaatacaggcaggctcttagatttgtatttgtcaaatgaatcaaaaaaaatcaaagcagggtagtatagatagttataattatattcaaatgtaaccaattttgattaagtaccaagcaaaagcataactgacaaaaaaagcatgaatctttttcagtttttacagttttatgcttacttttgctacaacaaaatgtaaaaatgactccatcaattctactagcaatctgttctattttaaaatgggcagagtacttgctaactttgttataaaatcaagactatttattacttatgaaaataaattttatttaagaacatgaaggttatctggcctggaaatacaagtttctacatggaataacaaaagacagtaagaggccccattttataccactaaccatttgctaatttttatttaagaaataaatgagttcattaataaacacttcacactgcccatgacctacaacttcacaaacctttggtcatttgcttttctctttccaagttgttaaaaaaaaccccacttggattctgcatactctattgtgctgatacagaagacacataacacccacactagtgactcagaaaatataccttaaaaaaagactattttctaaaaatgttaaaaaaaaaagtaaccaagtcacccacaaaattgttcccactttacttatagtttgttagatgaatcaaattgtaaaaatttcagatttacttatagtttgttagatgaatcaaattgtaaaaatttcagacgtacatgtgcaatatgtttgagtggagaaataaaaaatctccttagcttaaattaattatatctaatttatcaattatttgactagattagagggataattttttaaaatggatcataaatgctactttcaaggatagaaaaactataaccattaaaacagtatgttgtctacagtttcatcacaggccttttccccaacaaactaaaatcaccaatatgatatacataaacgttcctacttagtctggaccatatcactcacatggggataatattgttgagctggaactcttggcatctgtgcgtggccagcaacaggtccaggcctgctcttgggcacttgatgcctctcataaggaattttgggtgattcctgttgtcctggtataggatctccttgtgctctacaaagtctgtctcgaagctgcacaatatttggctataagaagcaatggaagaaagccaagcaaattattaaagagttcacccaactatacatgacatattgatcttaaagtaggcatgatcgtccatatgatttttgttcatatgctgtgtattacaccacaggctctggcacatcagggtttgacatcacggtttccaatattcaagactggcaccaaaggtccatcatacacagtgtaacctatcatgtaactgagggaggcatttgagtcatgcccgccacatggcagtacgcaagactgatgtcactcatcatcgccgctcatgtgttgtcttcttgtagtgacagatgagtaacgctcacaaaccacaaaagcacaaaagttgaaaaaaatacaactttgtttctctgtaggcaaaaaaaggttccaaaagagaatcaactactaaagacagtcatggaaaaaaatggtgatctacgaaagagatgaaaattaattaaaagagaggtgcttgaaataaattaagagtcagatgttaaattcagggcagctcacatggatctacaatcgatctagagtaagtatgagctgaccatatacatatgttaaatgtttcagcaacacttcatgttagtatctataaacattatacatttctataaattcattaaaagtttaaagatatcacttaaactctgtgggtatacttaggtagtcttttatggagaagaactataccataatgatgttacaaagtctcagaaaatattctccagaaaatacttagggtatactgatatatatagtaggaagtaatgtcaaaattgaaagctctttaaaagtccaaagaaaagcatgaagaataatgtatagaaaatgtatgtgactataaacagttttaaaaatgaagagtttaattctcaggctagaagacctaaaggtcttaagagaaagttagttttaagattaagggttttagacctcaatataagcagaaaatcctataaaactattaaaccaaagtcattataaagactttgtttccactccacttaatgttctcattaacaattaagaaagatgtgagctggatcctacatgtgagtggatacaaaaccaactagtgtcctacctccaccatcccgggacacgggtataagtatttttacctaatgaaatgtactgatatgccctagaagacaaaatactgaaaactgagaaagttgtcaaaaactgaatgaattttagaataaaaagatcataaataaggaaaggctcaaaattaagctctagcagatacacaatgcagagtcacttgtgagtctggaaactcctgcagggaaaggattttggcaatcttaatcatcactacatattcagtcacttgctgaactgaaatgaacaatatgaaatgaataactgaaatgaacacatatgaacaaggctgagttatttcacaccaaataaggagactaaattatgtgtgtaatgtagtgttctctgccttggatactttaaaaatatactcgcctacagacagcaccagactgaaacagcgtgtagagtgaatgaatacattattacctggagtgtcatttgtggggattttaaaatcgcaaccccagtttggttaagtattaacctttatagcttctcaacaccgaagacacctaacaaagaatcttatgcacagaattagtgtttggcttaaaaaataaaaaactggttcttttcctactcattttcctcaaatactatgcccttcagtacaaagggaagaagactctatctctgacatagcctgtgtacacctaaattaaccttgaggacgcgtcactaatattcaccaatagttaagtgatagacactcaactgctccaactagtacatttatgtttaatgctgtgtgctatctactgaactcaccttactcattcagtaaaagaagaaaaatggccagttctaattacctggttggtgttttcaggaagaaaggccaaggctgcagcaatgctgccctgggctgccagcaagctggcatactgactcatcttctcagccagaagagcccctacagtgtcagggtccatggcctgggtgagctgtacagcttttcgcaggatgacaactttctcaatcagatcctgagtgagaaaaagaaaggggagtgaaggagaactggacaacgagaccaagatgtatactgaggggaagcaggaaaagataaggggttacgaagagctccaaagcctaccaaaagcaaagtgttcattatcaccaacattttaaagctctagaagagtggaccatcatttaggtaactagaaaagcaaggaggaagaaggtcttctacacatggttaaagcacaggttaccatcttctcctaaacatccttaactgccagatacttgttttgtgagttaaaacagccaagtatccaaagtgaaaaagacaggcacatgtccgaaggcagaaactgggtcccaggaggtagaagagaaaatattataccataaaaatagtagtacgatgaggtgacctccaaacgggcttagtatttcaaacccaaagtttctcatattgctctccgatacccatttcaacaagggagagctatgcatcaggtataaggtacaagaatatcccaactgcccttcataagtacaccaatccaaccttgaattgtgggaaaaaaagcgtcttctctcagaagcacttacaaggaaaaaccttgattcctacaagacttttggtttcagtagtgatctttaaagccacaagcctactgagaaaatctttgctaagagaaaacacacagactgagatttcttgagactctgatgactaaatgcttagggggggaaaaaaatctaaatatacagtactcagcacctgaccacagtccccagatttttttactttctcttgccgtgtaatagtgctacatgggattccgttggtctcttacactaatttctcctgaaccctgaagactgtctgctggtacggaggactcctcccactcctgaccccagtgggtttcctggcccaaggcaaacaggatccctggaggcagaggaggagcatgaggaaaagagggaaactggctgtccccatgctcctgccacttactttcctcactattatattccaatttcgtcctcataaacagctgcattcccagttcactatgccatcacctcaaaggctgcctttccaaatacagcagtaaatacacataattacccagccaaagaactaaagcgtaattaagtagggtgaaagcaatgaacacctggaacaaatcagtctctagaatataaggagggtgaaagacagcactagaggaacaccttttgtttcaaagctactaacctggagggacaaaggactgctaccatcttgagctttagtccagcatgcaactagtttctccacattccctgcacaaatgtagcagagacaggcctgagtctgcaggaggctatcaccttcactttcaagtctggttcccagaagatctgtagaggaaaacaaataagtttacacataaggccctctgtgtatgaggtcatgagctgcccagtaatattttcagagatatggatcaaactttataaccattgagtagcaggcagaaataaagtcactgtcatgtcaatattcaataaatactaagtggtgtgacaaattatatacaatttcataagattctatacctagccatagaataaatctctcctcatcacattagaaaaaattaaaagtgggaacgatatttgaacagaaaaatcctaatgaacatttaactgcattttatcttgtccagatgcttttgtaagcagtggactaaaatatggcacatttggtgtaaatatcagtaaggaggactatgctgaattatttataataataaagttaataccttataatttttctattctcataatactttcaaggttattcgtttttatgccagcagcctaaagcttctgttcttgcatataatagacattatgtctgagttatgagagtttagtcatggccttcaacagtaatttctacttattttatcaagctaacatttattaacagagggctgattatgtgccattttacatatgaatagactaaggcttagaaatgaatttttcctagttcatacagttagtaagtagcaaatgcaagagtctcagtttggtctgtgtgaaatcaaaatcattaaacaatattttaaaaaatgactagaagttatggagaaacaacacagtcaatacttctgagaaaagcattcaaatgagaacttcatttgcttattctgtgattagtagtaggtttacaaaaacttctaaataaaatctgtcactaattttacttacaatgtatcatgccatgtatgtcatataaaattcattttcttaccacaaagggcggaaaattcatctgctttagcataagtcaacactgcagctaatgcctctctccaatttttaagatcacaagactcaacaatctctttccaattcttcatcactactgccatgattagcttggggaaggaaaaccaagggacaattaaaagcctttggtatactaataaaaattaactctggctaatcaatcacatctttcaaactactgttgacagtatttcatgcaaaaaaaaggagcagcaaagtacatccttaagccaactgacattaaaaaaaaagccatataattttctctcataaaaaaaaaatcacagtagcctattttacaaaaggctgagaaggaaaactatatatggtgttaaaaaacattcctggccaagaaagtactaggggcaaattcctgggagagaaaaggattaggctgtgtgaggaactgaaaggcagccagtggggcagaaagtggatgggcgggactgacacgacccaagcctggagacgaatagcaacccaggctggtgggactgagcgctgaggcaacttttatggaaagaaatcgaatatcgtcgagcagggggcttaaaaatctatagaccctctgcaccagaaattcctttccgaggacctcagtctcattaaacaattagaaatttgtacaaatcttttaggcacaataaggatgtttaccactgtcttaactatattaggaaaatataagaaactattaaacatcttaaaataagagaaatgatatagccctcctatagaatattacagggcaattaaagttttttgtaagaagcttcaatgatatgggaaaatgattacaatgtaagtgacaatgtctataagtaaaacaacacacatattactttcagaatcttgattctgtttttaaaaattctacaaatgcgcagagaggtatacaaaaggttatgtaccaatctgactgaagaatcaggaagtattaaaatgtttaacattttctatgttctaatctttctacagtaaaaatatgaaaagcattttaattaaaaaaattatatatgtaaatgacaaaaacctgggataatcatgctaacctgttaacaataactaatttctgggttaaaggattatgggtggtttttttgttcttcactgttttctccattttaattatctataatgagtgctttgctttttacaaacaaatgctattatttattattaaaataacataccctggtaattttgctttgggattttgcaaagtatttcttctgggttcgagctaagagttcttgtccacctgctatggccaatataatggcatcagccatgcggttatcatgtaaacaaaggtcaacagcactctcgaagttacccgttagcaaagcctgagtaattaagccatcaatatctgcaataaagaaataatacactcaaattaataaaagtttttgttacaagaaaaaaaactacaactatcaattattagtacacattcagcagaaaacacaaagttgaattctgaatattactggtaggttaatctctatcacaaactgctgatatctacagaaacatactaagctgcatgtaaataaaatcaggtaaaataacatatttttcagattgcttaatgcaataataaagatcctttacagtttttatgacataggtatcatcagatcatgccatcatttttaaggtactgattacatgtactaaatgataactgagttcttcttttcaacctttaccacatgtttgacaaaatgtttctgacttaaactcagggactatttgctttcaaatggttaaaaaatttgatatcaaaaccaacaagatacttacccccactgatagagatgttaaatgttcctccagctgttggtagaaattcagattcttgtttttcctctttaatttgctaaagagatggaaagagcagcaacttagccggaatggaactacaataatttaccagcaaaacaagatttaaatatgattacttactgcctagatgacatgccaagttatcccagagaagctctcagattcaagtttacactaagatatatgacatccttaagaattaactcttatcagataatcataaaataaaatccaatgtcatcagaaacaacatgaaacaaacttaaatgtacatattcacaatggtggctcagaagatactgaagctgaaaaatctttttcttagatatctcaactaagagtagcctgagacacacaaaatatgttttaaattacattacatttagatcttaaaagcaactttgcttccatacatctaaaaacttctgtccaagaggtgtagttttaagagtcttttggttgtaactgactcagctgtggaaaaaaaataatgcttggcgtccttacataaatgcagtgtaaacagttatttatcaatatactcaaattcaattagagattttgtgttcacttcaactaatcatacccggaactgtaggctggtctggtaaaaatgtacacagttctgttataaatttctgaaactagctgtaagactgagtaaaaataaattcaatatcttctttctttagaagcaaagaaatgtaatagaggccttctgctggcaaatattttaaatgttttctcttcaatgcataaaagttcaaaagaagacaaaaaataatatatatcagattatagaggaactaaaagaaaaaacatgtctgtcttacatgagataaaattttatcttctgtgctcctgttactatacatttgaatcttagcacccagtattcaaagtcaggagcatttttgaattggataattttagtgtagcacagagtatagcatcatctgtgaatgaagttaaatttagttaaaattgactattaaaggaaaataaccacaatcttaatttcttccctaacaaaagagaaaccttttagaatttaaaaactgaaataaacttttaaaactttattcatattgtactgatgggctcagttgtgtccaactttgtaaccccatggactgtagcctgccaggctcctctgtccattgaattttccaggcaagaatactggagtggattgtcatttcctcctccaggggatcgtcccgacccagggactgaacttgtgtctcttgcatctcctgtaccagcaggcaaatttttacaccactgtaccacctgggaagcactgaggaataaatcagatacagatccgattatattcactaacaaatttacccaaaaaatctttttcttctcttaatgatttttcaaatttgctttcaaaaaactaataaacccttatatatggacttctaaaacatacacaaagccaaaatatgcacaatttattatgtaacgtgtatctttaatgtctaaactacattttattttatataattatagcatcatcaggattaaggagaagatatgaccaccttaaacatttttttcaaatattctgaaagcacatattgatgactactgctttgtttcatacatatattcctattaattcatgagtggatttctaaacaattctctatttgtatagaaatagtaagtccagctgtatatgaatcaaagtatctttcttgaatgtatcctacaattctaggtattcccaaagttagttcaaatttttagtaagattttatccatatcctttatttttgagttaaataaatgcttgaagatccaattctgaggaaaatatttataataatcatcttgtaatagtctaaatttaaagaggaattatttttataacttagtaaaaggctctaagaaactttagtcaggatatctccatatcaaaaagaacaatgaaaaagtcaaacatgagatgagaaacaagaacctgttgattaattttccaagatgaaagaaatataattagaaagcaagtaaagtaaattatagaattatttattagtggtttaaaaaacccataagattaaaaaggaaaaaaattaatgatacaactctgtgttcaaggactctttttttacctataaaaatggtcactataactcaggatgcattgtctagtgagtcagaacaatcagattattagtgaaatattctttacttgggcttcctggtagcttagatggtaaagcacccatctacccacaatgcaggagatcagggtggattctttacttggactcaaaattcaagattaattcagaggcctatgcccctgatcgtgagccttaaacattaacaagccaagaaaaaacactaatgttgcatgcaatgcaatgtggatttctgaacaaaatcttttttcagtttgcaatcctgatatactcacatcagctgttaattttaaaccagataatccagaagctaggtcagagaactgaagactttagagatggtatgtgcttagtcactcagttgtgtccgactctttgtgaccctgtggactgtagcccgccaggctcctctgtccacgggattctctaagcaagaacactggagtgggttgccatgcctttctccagggaattttcccagcccagggactgaacccaggtctcctgcactgcaggtggagtcttccatctcagccatcagggaagcccttagaggtgggacttctgtcaaattagtaaacagactccaatcttaagcatcgctaagaaaatatatgccagctttacgctggaacatgcagccaagaaattttccttgtttcactgtgagataaacaaaccacatgttttccccatgttaaagatgagaaaaataagtacctctcccaagagctgctcttcagcagcagggctctcctccccgtcaccctgcgctacttggtcagagtctttaagagcctttggtacacaaaacagtgacagatggggttgaagaatgtagcatcaaaaggttattagggaacaaggaagacaaaagacccaaccaacaacattcagagctagtttaatcacaagaagttacactgagtaaatttatttgaaaaacatcattagaggaaaagcaaagagccattattgctaagacccaacccctttttcttgccaaatgagaattatccatgtattaaaaacatctacaattagtatttttaaattgtaaagcagtaagacagacaaaaatttcctaaactatattttcttctttatgacctagaccaaaattttagaaggtagctatttttacaggcctcctcttaccacatcaggtccatccactttgttcaaggccaaagcaatctgaaataaagacaacaactcagctaccaaagggagttaactctatttcaaggcatagagcaaatgttcacctactactccattctcattggcaaaaatccaaaacaggttcaaatcagggatagcatgctcaagagcagagtaaaatgagtgcagaaccgattctcaaggatgctggtttcaattacgtagatttattactcacatgtcatcttactctgctattcagttgtaaaactaacctcaaaacaagcaggtttcttctgtcttaaataaccataaaaaaaaatttcttcagatactcactatggaaagaacattaagagtattttgacaatctaattttatctcctcatttttttgctctcaggtatgcagtaaaactttcatgttaatctcttgcgttatagcatgaagaagttcagactaacaataaagttaaatacaaaaaaaatctaaagcagtgagcaagagacacatggccagtaagcaggggggctctgacgtgagcccaagtcactaatcttccaagtgctcagcactgcctgacaggagcgcacaggatccaaccggctgcacatgcgtgataaccctgcgatgctatggaaaacctgagtcattttcaaagaatggcaaagggctaatacagattacacaaagaatccaatatagttccttcaaggtttccaaggtcagagtgttttaactgctgttaggccaacactgtcgaataattattaagctcctcagagaagaaaacttgaaaactggaatatgacctcccatttttaaaaagcaatcttttttttaaccttaaaatattaagcaaaaacaaacaaaagaaaaaacaattaagcaaaccacttgggctttttgtttattcaggctcagtacagtaaaacacctttgttccaaaatatttattaatactagttacttgtgagctggaccaactcaatacacagtttgggaactgtgagctgagggcataaatagctggggtggaaaacagtaccctaattttcatcatttaagctgtagacaatgcagggaaataaacttttccctctctttcctccagagccactgactactcatccttttaaaactctacgtgctattcccagtgtttgaggctcactgcttgttttaaggcccaactgacacaactctttagatcaaatttaaagatggttctggcagcttctaaattagggtattaccgatgaagagtttcgactttaacaacataaatccaaaactctggcgaccaagcataaattcttattaaatgtttactaaatgatttgaagtaatctgtaaaaaacttaaaaaaaaaacacaacacctacactacataaatatctcacctgtgtgagcacagcctttaaagctttcccgaaagcttaccttctttcctaggtcttcttttctatatcctagaagttcaaggtattttccacgagaatcatcctcaaagtttaccttaaaaaaagacattttcttgaaataaagaactgcatctaaaggcccagtttttaattaactgctcaaattccaagtagaattatttaaaatatctaaagtctactatatcaactagaagcttcactgtaagagaatttaaagtttttttaaagaatctattttttaagaaatagtaagtctactagtaattaattagccaagctgaataaagcttactttcaaactaatatttgtaaaaacaaactgagtcatgtccaaaggctacataaatgcaaaactcacattatgtgaaatattcaacatcacatgctaaaactttcttgaaactagtacttacaaaacataaaaatgaatgaaatattattgcattcaagagctcttttctttgcaaaactcagacttggggaacagacattccagtggaggcaaaataatcaaaaagaaaattatatttgctattttactgttataaacgcgactcagtaaacgggatgagaaatgcctctgacctctcccctctgcacctagtcccttgtcccccactgtctctaattggacttactacggaaacgaaacatgctatgtttttattatactcagctctatgttctaattttaagataggtctgctgaatgttatgtctcttaaaaacacttcagcacttaaaaacatctagcatattatttaaaaagcatttcatattaggcttttcaaagccaagaaggaactcttgacataaagcattatttcacatgcttttcataaggttttctttaatttcatcacgagatgccccaaatcacactgcccctgctgttgctttgacaggaagacaggtttagaatgtgatgagaacagttaaacttgcagataatgaaggaaagctgcttatcaccaactttaccttcaaaaaggaccacacgtttttttcaaactcagtctgagaagcatcgatcttcttctgacagtaactgacgaatccctgtgactgaacgacctgctgcagctggtccgatcggctgaggaactccttctccgtcaccacctgactgatgaacacgtggtgctgctgtggctgctgctcaggccccggctgaggctgcgttctgacattcgcaaaggtgaccagtttgcctccgaactagaacaggatgaggaaacaaaatcagcttgagacacaaggacgtggccccctaacgtgcttctcataaacctgctaaaggaaagaaatgtgacccacacgtctccctctgcatgcaattcgctgatgctctcttccatactccacgatctgaccccagccttcaatttttactccttttcataacactcaccttctagatgcaaagtcctagcagctgcaccctacaatttctcacctacttgcttttactcacttccacatactcaatgtgactcctcctcaaggcctgggcaaaggtcacctctgccacccccagataccctcagtatattacatttatctctccctcttttgattcaactattagcctttgtatttgcctcaccttctactctaggctctaagttttaaaagggggtgagtatgctgctacaaaacatgccatttggcataaggattatcttgagctgacatgagtttgagcaaactttgttggtgatggacagggaagcctggctcgctgcagtccttggggccgcagtcagatacgacgtagcaagtgaactgaaagaatactgagaaatagcaggaccaagaaagacacactgacctcctcttttctctctgaaagtaggagatgaaactcccatgtgagagctgctctccttatatcaggaggaaaaaaccactcatctccagagatggggagtccaggacagtagaactctgcacaaacagaacttgataaatagaaatcatctccctccgtctctctacgtattttaattactggtccacaactgccgttctttgctcaacctagtctagaagcactttcgctgtgccacacctttgggtcttcatttctctagggggctcccacatacaggtttgctatcattctcgttataagcaggctcagaactcttcctctgccgctcacagtcactcctcagcttcaggtattgatttttttcttaaacctctttcatttcttccttttacattgctatttttctgcctaattcttttcacactgaactgctgtatgactgcatgtctattggttgtcttttcctccctccaatccatgctacatactatcagttcaattgctcagtcgtgtcagactctttgccaccccatggactgcagcataccaggcctccttgtccatcaccaacttctggagtttactcaaagtcatgtccattgagttggtgatgccatccaaccatctcatcctctgttgtccccttctcctcctgccttcaatcattcccagcatcagggtcttttcaaatgagtcagttcttcacaccagtggccaaagtactggagtttcagcttcaccatcagtccttccaatgaatattcaggactgatttcctttaggatggactggttggatctccttgctgcaggacaacaccacagttcaaaagcatcagttcttcagtgctccgtcttctttatggttcaactctcacatccctacatgaccactggaaaaaccatagctttgactagacagacctttgttggcaaagtgatgtctctgctttttaataaactgtctagtttggtcatagctttccttccaaggagcaagtgtcttttaatctcagggctacagtcaccatctgcagtgattttggagcccagaaaaataaaggctctcactgtttccccatctatttgccatgaagtgatgggaccagatgccatgatcttagttttcttttcaatttttactttattttgctttacaatactgtattggttttgccatacactgacatgaatccaccacaggtatacatgagttcccaaccctgaacccccttcccaccccatatcatctctctggatcttccccgtgcaccagccccaggcatcctgtatcaaactgatcttagttttctaaatgctgagttttaagccaactttttcactctcctctttcactttcatcaagaggctctctagttcttcttcattttctgccataagggtggtgtcatctgcatatctgaggttactgatatttctcccagcaatcttgattccagcttgtgtttcctccagcccagtgtttctcctgatgtactctgcatataagttaaataagcagggtgactatatacagccttcatgtactcctttcctgatttggaaccagtctgttgttccatgttcagttctaagtgttgcttcttgacctgcatacacatttctcaggaggcaggtcaggtggtctggtattcccttctctttaagaattttccagtttgttgtgatccacacaaaggctttggcatagtcaataactcagaagtagatgtttttctggaactctcttgctttttcaacgatccggtgaatgttggctatttgatctctggttcctctgccgtttctaaatccagcttgaacatctggaagttcacggttcacatactgttgaaacctggcttggagaattttgagcattactttactagcatgtgagatgagtgcaattgtgcggtagttcaagcattctttggcattgtctttctttgggattggaatgaaaactgacattttccagtcctgtggcctctgctgagctctccaaatttgctggcatattgagtgcagcactttcacagcatcatcttttaggatttgaaatagcttaactggaattgaatcacctccactagctttgttggtactgatgcttcctaaggcccacttcacttcacactctaggatgtctggctctaggtgagtgatcacaccatcatgattatctgagtcgtgaagatcttttttgtacagttcttctgtgtattcttgccacctcttcttaatatcttctgcttctgttaggtccataccatttctgacctttattgagctcatctttgcatgaaatgttcccttggtatctcattttcttgaagagagctctagtctttcccattctattattttcctctatttctttgcactgatcactgaggaacggtttcttatctctcgctattctttggaactctgcattcaaatgggtatatctttccttttctcctttgccttttgcttctcttcttttcatagctgtttgtaaggcctcctcagacaaccattttgccttttggctacatactaatcttcctaaataacagatggttgcttacatcacttgtaaattcattcttgatttaattaatttctcatccctagtgctggtcttctctactatctgctctcctgtctctgaatcttcactttcacttgtgactttccactttacttactgaatcctaaccatccatctagttagttctctacttcccaaagtaattaaaacttataaaattatatatggataaggtttaaaactcaaactgtacagaaaagtctccctgccccccaatatacactatttgagacacagactctatctagttgacaggtgtgtttccagtgcctaggagggtgcctgacagaggatgttcactatacatatttatcttcggaatggaaagtgaaggtccgttcactagtactgaagtattatgaagataataactaacactctcttcttccccacatgagtttggcaccaaggatgagagagagaatccaaatgtcagctttagtgctggcgtcaaggtgagaggccacagattagatgtgcaaccacagtggacctcgtaacaactggaatgcagcaccctgccaccccaaaaagaaaagaaaagaagggatgaaggaagcagagacagagaagggtgacaagtataataaagtggggcagtgggacagtgcaaaggctgcaaaacaaggtgaatgtactcaatgccactgaactgctatattttaaaatggttaaaatggtcaattttatgttatgcatattttatcacaatttaaaagaaaaaaagggagtaggttccactcttcctgagaagtctttctgaatgatgaaaactcacaaacacatctcaaacttggccctcttccatctgagagatcttataataatactctgtcctcggtgtttatggaccatagaaacaaatccacctactgagaaggaagcaccaacaggccttcggatccatttgggtggcttcttcagaggcagcacgatactatgtggggtcgtctgctgaggaatttgtaatgggggaagaggctgtcctgtgccgaaggggtcaagattcccaaaagatgatgaaagctaaaaaataaagtgggattttcataacttatacaagactatgttacacgttttcaagtcatactgaataaatttttttacacaattttccaagtaattggtatcgctgatctgtaaagtcattttcaaaataattatacagtaagatcattcttttcaggtgttgtaattaaaaaaagtgtaatatttcctattaccttgtcaacttgtttctgtcttaaaccatctgcgctccctcccatgatagaataaacgctgatacgcccatcaaaggaagcagctgataagacagcaggatttctgggacaccactgaatatcaaagcaccattgtgtgttggtgggaagttcatataacacctagaccaaaaaaaaagtatacaggcgctttatagccaaaatagctgaatcactatgatcaacaagtacaactttaattaaacatttacttttaggaagtgtacagccaggaaaaacaacaatttaagaaatttctttaaaatacaagcaaagttcattatgacaaaaacaaaaggtgatcaaaattttgaccagatttggagtaagaacattttaaaaactgagattttcctatttttattgaaattgtaatagaagatgcatctgaaagatcagaatactgtattaggatcaacttgctgaactctaaaagggttctatccaactgactttgctggccaagatccaaagtaccatgtttaaatcatttgaagatcaaatttcaaaaacaactcttggggggcagtgggggatgggatgaactgggagactgggactgacatacatacatcgctatgcataatagatgactaattgtgaaaatctactgtatagctcagggaactatactcaatgctccgtggtgacctaactgagaagaaaatttttaaaaaaggggatatatgtacacatgtagctaattcactttgttgtacagcagaaactaacacaacgttgtaaagcaactatactccaataaaaattaaaaaaaaaaattctggagaaggaagaattcactgagaagactggcttctttcttgtcaagtgagaagacacgcacacatcattcttattgctgcagaatcaaaacagaatttggcataaacagttttctttaggaggaacaaaatatagaaaaatgattaaaaatggctgatataaataatgtaataattgtttgctatctttacaatgtaatcatgtaataattgttgctaactcatagtgtgatgctgactgatgctcttaggagcataagttttataggtttaagaaataagtcaaattagcttaatttggacttcatgtgacattttaaataatgttttactctataaggaaacagaattaagtgaaaaggcatttagcctgctcatttagcttatccatctaaatttccataaatagaacacatgacaaatatttcatgataaagtatcatattcttgctgtacagttcagaagagagattgaaaatctacatccactgattaccaaaaatcaaagaggaccttcaggacccaaaccttgaacagtcctactctgaggacactgatttccagaaaacaccctaaataaatccaaccaactatttctgagtctagataaatgccttatattgttaatgaggggtgggggtggggtgattactaggttcaaatacaccattttcaatgactgatatttccagatgaaaatagctgggtttagataaagtctctgctaggttaacatttcatacacacctccatctactttcacattcttaattttaatcatgtactaaagaattcatatagaaattttcttattcagctagagttaaatattacaatcactccaagtctgagaaatatctcctccccatacctctcctgtgtttgggttggagcacagaatcttagcatctttcccacagctcagcaacaattcaggatccgccatgctccaagcaattgccaaaatcccccttaaaaacacaaagatgaaatttttaatctcaagaaaatgaaacctgcaaattatttctgtctaggctttggagagacacacggctaacagaagtacaatttcatataatctttctggaatgcaatttagcaatgggtatgctctgtgattattacaaagatgctcaatatagagtacagtgtatgatggcaaaaaagtgaaaacaaatgcccaacaacatggtctacacggggttttcctggtggctcagcaggtaaagaatccacctgcaatgtgggggacctggatgtgatccctgggttgggaagatcccctggagaaggaaatggctacctactcctgtattctggcctggggaattccatggactatatagtccatggggttgcaaagagttggacacgactgagtgactaacacttctactttcaaacaaagttacattttcagtaaatgttttgaaaaattcagattagcatcccctgcaaaaatttaagaaatcctgtatcctaccatccagaaacaagtactatataatattaatagtttgttttttctgcattcatgcctctgctatttagagatgaaagaaaagtcaacattaccagaccatgaagaaaaatactagaaactagaattatgtatctttcttaaaacaaaaacatacaaatagtcctcaattattctgaaaacacagtaattctaaaataatttttttttcaatttccaaaatacaggtaaacctcaccatcgaggtagatattactcttcttttccccaaaagttgtttttaatatgatgacatttcttacaatctaagtcctctcagaatcagaaaaatacgctataggaaaagaactcaaattatttaagaatgcctttgcttccaacattttactttttaagcattaaaatctttgtaaaaattgtaggatagtgtgatgtacacccttatacttctcacttagattcatcaatttggccacattaactttaggtctttatattttacgcgcgctctctctatatatattgcatctgtcaaatgcagattattacatgacacctctacacttctctctggtgataagaaccttctcctatatacatctcatactgaaaatgttatttttatgcaatactctaaatagagagtccatattcaactttccccaactgtagcaatgaatgtgtgtgtgtttaagtcacttcagtcttgcttgactctttgcaaccccttggactgtagcccgccagagtcctctgtccatggaattctctaggcaagaatactggagtaggtttgccatgccctcctccaggggatcttcctgacccagggactgaacccacatctcttacacctcctctattggcaggcgggttctttaccactagtgctacccgggaagtccatttaggaataatggagtcttactgtctcctctctttagaatccaattatgcatgtcaaaagtttcaaggcacgtcaagaatgcctttagatatcagtatcatatttaatatcacatcttaaagaacatttaaattcttagcaagtgttaaaaaaaaaaatcactgaactatagaactagaaggaccttaaagatcatataatccaactgttgcattcactagagggagaaaacagaaacagagaggttgatttgctcctggcacccagtatggtattctgtcttgctaaactgtggccactctgaaaactggcagtataatgtaatgttaacagcatagatacaatgaccaggatgtttgagttggaagtcagcagctgactacttttgatctaaaccaagtttagccttaccaagtttcaatttccaatgtgtaaaatgggataatagcatttacactacaggtttactatgagtcttaatcaagccaacttttgggaattagggactaatatgtatacactgctgtatttaaaatagacacccaacaaggacctgttgtatagcacagggaactctgttcaacactgggcagggatttttgtggtattactgaatcctagtacactggttggcatgtgttcgataaggaagtgtttaataaataaataaaaccttaccaaacatgggaaaaatattaaaacttctcagaatcaccccttctttactaaaaagctgactgaagcataacatctaaataggactacattgggtgaccagattcgtttctcctttatgagaagctcaaggagaggtcacaaattttaagacttctcaaagtgtataattctaccacacacgggggaaaagaaatttaaagctttagtttctatatccctaaaaaggaaagaagaaaaaagcccaaagcagtgaaaatactttaacactgaaagagatttgtttcttgtttaaaaacactgaacgaaacatacataaactccctgggtacctgaatataaaaatcatagaaaatcttcacaattacaaactaattttgcaccttgtggatcttagctcccatgccccttacagtggaaacacagagtcctaaccactggactgccagggaattcccacaaactaaatttaacgctactaaagttaacacaagacaattctcatgttttttagagcatccacacacttactaaattgaaggcagaatgaaccacttaatatctcaaaaatgtttgcttttaaattaagataaacactcagaagtaaaacaaacttttcaattgttgcttgacattaatgtcatggaagactcttcataagtatgacgaatcaaataaagatcaaactgtataatggcccaaagattcaagagttgtcccaaagagctatgattcactagaattttgatctattacctattatttgaaataagttgtagaaaatccataaacacattttcatgtttttgtgatatgatttggctatcgtgttttggtacaaaaaatcagatgactattgcttaaaatagaaatgaactatttatactaactttcgtaagacagagacggagtagattccctaattttaaaaagttatctgataattcaaagcagtaagtaaatacatttttaacaattcataaatcaagctttttggaagagcagcaagatacctggcatggttttccaggacacggagtggagaggaggcaaagcgaaggtcccacatctggactactggtagcctgtcatcctcagaggcaaggaccatctgagtggcaacgtcaggatgccacgccaacccagagcaatgcatctgcacacaggcaaggctcacatcttatcaatcacactactttacgaaaagccaaaatgaacacgaggaatatatgtttgttgaagcaaatagtagaaaacatcagctcaggcttatgaaaaaagtattcttacttatgtagtcattattttattattttcatttatttaaaatttgttttttaaaaacccactaaactattaaattctattaaacactcttaaacagtggtcttaaacaaacgagtttaagtgttttcaattcaaccaaccctttgatacaccaaatcattccaggccagagtaattctataccacaaatgagctgtcctgtcaaaattgtaataaggggaaaagctttacataaatttaaaatttaatacttttagagaaatgaagatgagaagatttaaaaaattaatacctttcctctactttatcagaaaaatcaagataaagtgactaaaccaacaactactgtttaaattttcatatgggataaattaacattattactgagaaatacttggaagctcagatcttgttacgtgttctagaaggtgactgaaatgcttattgtgtactttattccactgaaacttgttttaaaactcctgacacactgaaaaacaatactttgaggaaatattcttataaataatgttttctcattgctatcgttgtttttaaattatatatgcattctctgatttaggcaaactcactttttaaatgtccaactaaaaacagtgattaaaagcaaattaataaggcaagccctaaagtgtgtctaaattactttataacatatgatgaaataatattaatgaatctgtaaggttaaaatgtaaggtgttatacaacagcgtctactgagcaagtgggagaagaataccagttcattttagcactgcctaatcagaaaagaggaacccaagagtctggaaactacagcttcatagtcataaaattactagcagggaaaaagtttacattctagttgctataatgctttggaacagctggcaaagcacaacaactagtgtatcatggaataactcctttgattaaccaatctttctcttcatcattaatatagccaatgtggtttagtagggattttattattttccccaaagggaaaaacaacctctcattccaacatgattggtccctaagacaacaggatttgactttatagaaatctgatttgttgccacctctgacaaacaatataggaatagctacagcagaaacaaaacatgtttctcacaaatcaatcacatacttaccctgttactatgatcactaactttgatgataggctcattttttctaagatcccacacagtggcccgaccactgggactggctgatgccaaaatatgctgaacttgtctgttccatgcaatgcagctgatatcttctgggggctgtaatgaataaactactaagaaccatttctcaactgtaatcaagtttaactacaaaatctaattcttctttttagaaaacggattacttaaaaatctgatctattccttccataaatttatttttatattcttaagttctcaacatatgcagtttaaatctcaggtatataccaattcaagtactttaccctgtctattcaccagccacttattaacttcctgttacaaatcaagcactgtttctttactttgcaactgccccatggaagataatggaccacaaggcagatgctagtcaacgtgacagacatctaggcagagcaaaaattacagcctagacctagaaaaccatatactatcgttacactacctctcagattgccaaaatgttagggcctgttacaacagccactcgaactgaatagttaatacagtgtaaaaaaggcggagatgtctgttctttctcagcttattagaattatataggaaagagggtgtgtttctttttttaagtaagtttcctctctatgatttttattctgaggttggatattgctaaaatactatataatgtagaacattatattacataaaatattatacctaaaaaaactttttaaagactattttatttattaccacaagtctagtacctcaaacaatgcctgggagatggcaagtactaaatatttactgttgaaggacttgctgatactcttaggaaacatatttattaacacttgatcatggtaaagaaaaatcaatgacatctgaacactgactttaaacagatatattttgcgtgaaaaaaacaaataagtgcagaaaaaccaattttggttcttttgattacattgaaatcaatgtaatacctgcgttttggctcctggtgtcattggagttgcaaaattatttagatcccaaatgtagatttcagattcgttagcaccagaggccaccagattagtctgcaataagaaagaattaacaaataaatagcacttacaaataacgaagagaattcagaataacccaatttggagctggagagatctgttttcacagacactgagaacagccagggacatggctggtgggggaggtgggagagtgggctgtagggagagagtaacagggaaacttacattatggtatgtaaaatagatagccaacaggaatttgttgtatgactcagggaactcaaaccgtcttgttaacaacctagagaggagggatggggagggaggtgggaggtatggttcaagtgggaggggacatgggtaagcctatggctgaacaccatactgtaaagcaattatccttcaattaaaaataattaactttaaaaaatctttcagttttaaggcatataatttttctgtttaattaaaaaaaaaacaaaatgcatgaacccctaaaaactatatataacaatctgaaatttaatcagttttctaaagaaacatattgtaaaactttattaaactaaaaaagataacacatctgccatttcaatataagacactaataaaataattaaatggataaattcttatatggcgattattgcctgtggtttggatctctggaagggaatcagattgtgggagacaaaaataggtcaccctgttggcttcaaatagctgaatgctaaaataatagtgtctataccaggcacttcaaagacagcctttagcctccaattaaaataaataaataaatgaataaacaaaactagtttctggtgtaaaatgactcagttatatatatatatatttccattatagtttattttattataggattttgactatattactagttccctgtgctatacagtaggaccttgctgtttatctgttttatatatagtagtttatatctgctaatcccaaattcttaatttatccctctccaatccctttcccccttggtaactataaacttgttttctgtgtctgtcctcacctatttctatttcatgtatgctccatcttgcgccaggtggtagtatttctaggtaaactatgttgtgtaccttttggatcaaaaagaccctaaaattgtgatatgaagtccaggaagacaatgaggttcatatactgaccttcatcctttactgttcactctcattaatctactataacaactgacatacaactctgaaaacagaggaattccatggcagtagccacctatgataagacacgaaccaaaaatcagcagttgttggaaattagctatctaatctaaagagtatgcaccacaaaccacagaaaatgaagaagctggatttctgtatttctatatctaaaatatctatttataatacaagaaaaataactatcaaactttttaagatatttattttctgattatactcaaatatcctattaactcaagatttttattaatgtatgctgctactgctaagtcacgtcagtcgtgtccaactctgcgaccccacagacggcagcctcccaggttcccgtccctgggattctccaggcaagaacactggagtgggctgccatttaacatttctacaattaacattcagtaatgtttacaatggcaacagtacaaagactcttaattgcccattaaatttatactatatttatgcatatatcttattatttgatagagtagtaatctctgacataaatacatttagcagtaataaaacaacagattaacccccacataatagtaccagcctaatgctgaactagcacaaactttttaattttaaaaattattttatttacttatttatttggatgcaccaggtcttacttgtggcatggagcgtctttagttgtagcgtgtgggatctagttctctgatcagggatcaaatctaggccctcctgcactgggaatgcagagtctcagccactggaccaccagggaagtaccctagacaaacttaaaagactaggttttcaacctctgaggtgcctaagattttaaaaatgtccataaaatggcatgacatctccagatttctagaactaaacccatcaccctgatcccttccctggggctagtgtattactcacgctgaagccagctctgaacttttcattcttcatacaaatatactcactcatcaacctgcacaggcacagttttagctttctccaagactgaggcacagtagactcatatacttacttcaaataggcagcacatatctcaagaaatatgaataaacatcaaaagtctaacctggaaaatgttcacatccagtgctctcactgggccagtatgcttgtcattctgggcaatcacaacttccttatccccagcgataattttagaaggatcataaagaataatatttccgttttcaccacctgcaatcaggactccagagatatttcctttggaatccatcttatgaggtccccaaatcaacttgtggtacctttaaaagaaaatgagcaaaaatactcttttttgaagtcagataaacttagaaaagaatttggaaattatacatttaagccttttcataaatacaccaaaaacactgcttctcctctattcctggtaactatacataacttggtgaaatggcattttagcttttatttatactcatgtttcattttgtaaccttgaagggtacaaaaactcttttgtacagctaatacaacaaagtatacttgatttgtgtgtcagaagataagagcctaagaacggttttaccatttagaatctgtgagaccctgagccagttacttaatctccctaagctgcttttgattcatttataaaatagagctaatcaaccacttccctggattttatttgactacagaagtattcagtaacatgtcatctgttaaatagtaaagcagttaagggagtcatctgaaattttctaagaaaaataatgtattctgacagtaaaaaggtgatatcaaaattatgtctattatgacataattctctacccactggtggagaataaaagattacaatttggtatggaggtggcatggagatatataacaatggtactgagtagaaaatctgccagatgaaaggcatctggggttcccagtacagtgggagggcttggacgattataagccatcccatgggagacgccatgatttgaactgtattgttagcccaggtacaatctcttcaccaaaatttgtcaaggtattaggctactgaaattaaagtatccttctatatagcttaagtacttggaaatctacctatctaaatacttatcatatcagaaaccatgtcaataaaattctctgtgaaatgtaatttgaaatatacattagtagataggggaaaaaagcaacctctactcaaagaaaatcactattaacattttaatatttatctaaccactttttctggtcatgactacctttttctgtaaagagggaagattaaaaaaagcaaaagaaagtaactctactgtatcatgaggaaaaaaatactataaactagaggctttccttcttacacacaacagtccgtaaagaaaggaaattcaacagaacatatatagacactttttaaacttctgcctaaacaactcatatgttttttcacaaaatatgtcactaatgatattcgttacaacttcataatgggacacttatagacacattaggcatcaaccacaacatataatcaaataatcatgtaaatttcaggttgaatctcatacctgtgagaagaagagaacgtggcacaagatttcatatccaaggatggatcagaaaggtctaattcaaatatctcaagagaagcactggtactaaatgttgcatccaactgctgagcagatgttcctacagaaaatatattcatgtaactacacacgcaaaaacagactgagaaaaccatagaaaatagaaattaaatgcatgcttttcaattatctcactcatgaatgctacattaacgactgaactctcaccacgtataccactgaacagatgcttacgttactacagcggtaagattccgatgcaaggctcagatatgatgtttgtaagagtcggtagtacaattttttaagtctatagataaaatctctgaaagaacagttccatgcttatagtcacaaatgatataatttcaactctatataaaaatggagcatcaaaactgttgttccttcattcaaattggtattgacttctttacattttatctattgtgcttaataccagaggaataaagatagagcatggtcctgaagtgaggaagacactgtaaatgtaatagaccatgattaacactatgctgtacaagcatatgggaaggccgctgaacttagcagacaggaaggttgcacgtatctcgtcaggaaaggagaggctttctagaggagctgaagcttgacctgaatcttaaaggaaaagtataaataagtcagaagtggaaaagaagaaattaggtgactcatactgtcttctctctgttgaacttacctgtagctaggtaaatgggatgattctgtgcagggctccatgcctgcatggcggtacgatctacttcctttaacttcatcctgctaaagagaacatttcacatagaaatataataggtaagatggaacatttattaacatagaaatatactggacaaaccaatatattaatagtaatgttggaatgccaataaatcaaactggtttaggtatcatttgttgggaaatgtggaccatttgaaagaaacttgttaaattattttgagacaagtatagggctattttgtttacagattatcatccttcagttgaaaaatctgtctggaaggaaatgtgcaaaaacagggatagcatgtggttaattagccttggcatacagtatacttctcagtcaagataagacgggtggcagtgtagcagggctaagggaaggcacagaacaaacaaggtgcattttcctggagcaggactgctcaacaataagagcagtttgacaaactgattttaaataaagcagactaagacagaggtgaatacagcaaacccaaagaattttaaagataaagcagaaaaaaaaatttaaatggtcactccaagctacaatcccatatgctattattttgtatattctatgtgaaagttactttggtagaaaaactcaggagatactgtgctacagtattaaaaatatctttgttggactttcccaggtggtcccatggttaagactccatatttccaatgtagggggtgcaggttcaatccctagtcaggcaactatgatcccacattctgccaaaacaccaccaacagaaacaactttgtgattttacataaatgcattcgcatggcacagtattccactctcagatgtaccctagtttaattagtctcctactgaggaacacctgaattgtttttgaaagggaaagtcgctcaggagtgtctgactctgtgaccccatggaccgtagagtccatggaattttctacaccaggttactggagtgtgtagcctttctcttctccagcagaccttcctgacccaggaattgaaccggggtctcctgcattgcaggcagattcttcaccagctaagccacaaggaaagcccaagaatactggagtgggtagcctatcccttcttcaggggatcctcctgacccaggaatcgaactggggtctcctgcattgcaggcggattctttaccaactgagctattattcttacaaacaatgctgaaataaatggccacacatacatgttacttcacttatggacaaggaaagctatagttttccagaggtaaaactgatgggttaaagaatacaagtaattttaattctgatggatattgccacttgaaatatatcctggtatacagtgtattgaatatgttcaaagtatgtattttttattacttcaaaatcatttattgaaatttttttcttactaactttagataccacctttatcatgtaccaacttcctatatttatttctagatttaatatttaggtttatattcctgtacatatcaggatacaggctaagtttacatttcagtattcatttacatttattctgtgattaccattccttatgcccgtgtatttacatgctaggcatgtcactgctttaaatactgaggctttacataggcatgatttcaataatccccacccattttccatgctattttttgttttttaactacataagcaatcagaaaatttttagtctaattccagaaaaaaagagcatgttagtattatttattgaacctgtaccaaattaataaattaatttatggtgaactgacagaatggtgaatcttcctatcaagaacatgtctttagagttaagccgtcttttttatttttcagtattgtttgaaattttttgacatgctgggtttgcttactcctaagtatttcaccttttggtgcatttgtaaacgtggctttttttccttccactattatgtctatgatctcactgttaaatgaaggctaatgatttcgctacattaatttttaatcctgctttcttactgaattctctttctggagtagtgtttcagtagattctggtgggttttccacatatatattcacaccatgtgccaacagagccaatctccccatttcacattgtcactcctctgatatctttctcttgtgtgagctagccaggaccaacagtatcatactcacagcagtgatgacagcgctatttcttgtcttgccctgttctgcagtgggaaagcctactgtatcaccaataggcatggttttggaatttgagatatatatatacatatatttgtacagataagtgtgtgtccacacaaacttacatctgtacaagtaaataaatatacatatgtatgcaaacatgtatgtggaaatagccactgattactatcttactgaatgctattcataaagactgggtgttaaattttgttgaatgttttttcattaggtaattggagatgaccatatgatttttctccctcggtttgctaacaaaacaaagcacgaacagatttcctaacactgaatcatcttttcataccatgagtaaacttctcttgtccatgattctactacagagctcctagattttgtttaaaaggagtttcattcctagagtcctaaatgagatttaattgatagttttcctcttttgtacattctttgtcaggttttggtatcaatgttatacttgttcataacaaatgtgggaggttttcttcttttcccatgctctggaacactttcaataacaacactgaaattactatttctttaaggatttaccagaattctcccatgagatatctgggtctggtgttttgaagggaagataagtggtaattttctctgtttcttctatgcatattgatctatttgaagtttctttatccaaggtcatttttgtaaattatattttcctatgatattcctctattgtactcttttttacaatcttctatttgtttagactcaaacatagactcatgcttcttctaatttgtgctgtgtgtggtgattagcccttatgatattcatgttttatcccaccctcctttgaaaaattagcttagctaagtgacttacctgcttcactgagtatttataaagagtcaaattttggatttacttattagtttcattttttaaaagttttcctaactttttagttaaatgcttcacttattcatttttactatttctttaggctttgaattttccctgagcactgatttgttgtatgtttctggtcctatctttgtaactataattttaaataatttccatttaataccattaatccttcatttctttacatagttaattactatgagtactaacagaattagcttatataatcttactgcctctcctgcagtacacagttataatcattagtattatctttctcagtgtttacctttgtactgttaaatacacttatacgtctactaactgatttgtcagctttaaatgatgtcctttgactcctagacattacagattaggcaatccacaaaatttattctacctccaattttcttcctgcttcccagttctctcattttttagttttatgaccaatttctacatcatcagatatgtaacacgtacattttatcttttcttccttattcccactttggtttcagcctcaggtccatggtagttaaatatactcaatgttctccaacagcactcttgccagtattcttactcatctctggaggatgaagttcatcctctaatagttttcttaagagggccttagactaaaaatatgccctgtgtcttaaagttgtttacatttgaagaacagatgatacaaggaaggcacagaaagattaaataatttgaacacaccagcaagggacagagccaagatctgaactcagaagtgagctccagagtccagcctcttacttgttacaagctcaagtattcaattttaatcataaaaaaattaaaatttaggagaaataatgaatggcaaagaagctacaatgcatgatgaaattaagagaagaagaaatgaattttagaaactaggtgaggtcaggcaaactgggtgaattaggctgaatcacaccacaaagaggcaggacctctggtcctgaacattgacttctggtccttctggtccttcaacctgaacactgactgctacttttgacacctttacacattatttgatctctctgagccccaattcccacacttgtaagatggggataagtgtgactacctcaggagatgttgtgacgttcaaatgaaagaaatgtattttacagaggtccaaacacaatgcctagcacgtaagtcaaaaagcattttaatacactaactactttaaagattattatcgtcatgagactaatcaagaaaactgcacagctagtttcctaagattattgtgaaggaaaaaaggaaaaaacccccacaattttctaagaggtaaaaaagaggcctattttttttctatgaaaggctttctttctcctctcagtcaatagtctttagtaagaagttcaagtcccatctccttcatgaaacctgctctactgatcccatcgacactgatctaaactctttgtatttgcctataccacactttaagcaactcatttatcttggtaaaactttataacatcctcttagtacatactgtttacatatttcctcactgttttatcaacttgtttcatcttgtttggtcatcttgtttcaccaaatcgacaaatactgtcttgttttcaatcaagtcttacaacttttaccctttttgcatctaaaactgttatacacagggtgagatatgcattgcttgattgattctcaatgtctatatttagaggaatacaaaaagactgatgcgctagaaagaccaattttaagtaaaatatttaatttttaaattcttaactgtttaaaggatctttcttatttaaaaagtgggaaagtactgcttgggggaaaaaaaaaggtttcctaaaatgcctttagaataatttctaatattgaaaacaaaatagctacacacacacacacacatatatatatatatttaaaccctgttgaatctaattacagtatctccaggaagaaaggtacaagggctacaggaattcaggagcacttagttaatgtgtaacatttactgaaagagagaaactaatttacaagaacataaaagagtgaagagggaattcaaagcatttataaaatctgtttcttggccttagtactcaatgtgccatcagaagcagttccacttaataacctgtactgaacataaggtttaaataccattgttttaaaaaaaaaatcaaatactatactacaacaatggccttgaactacattaagcagtttgaatctaattaaacaaaaatatcataagctacaatcattctcaaaattattaaaaatactatgaaaatacagcttcatcagatacatgtgtatttccttctcttacaattgattatttagttgtaaccagtttccttaaaaatatgaagaagtcttttagattaaaccatgtcaatttcccaagtaagacttgctttaaaaactttctgtagtttttaatgacatatttttatttcagtttattcatctggctgtgctgcgtggcatgtgggattttagttaattgatcaggggatcgatcgaacttgtgtcaccctgcaggggaagcacagattcccaaccactggactgccagggaattctctatgtaatttttttcaatattgtatgtgactagaattcacaccacacagatttatttcattcggaactattttgcacagaacacaatcattgtgaaaatatgaaaagaaaactgtgaggacgatggtttgttcacacatgcccccataagacagtaccaaaaggagagcagttaaggtatggagactggagccaacactgtcagtttaaatcccagttccacgtgtcctagttttgacttctggtaggtaattttatctatgtgtgtcttggctaaccatttggtaaaataactatagtaaaagcatctacaacataggtttgctgtgagaattcacagagaacagtgcctggcacctggtaaataaatgcttgtaaacggcagctaaaaagtcaccatttaataaaatgtttaccccagtgaaatcttcaaaagaatacatctactgaagaaaatttacgatccagaccacaacttttatttattcacccaagtttctctccgcaacaattgtgtgcagtgaaatgaaactttccccctgcattttctaaaagctgattttgtgaagcaacgctaaaatccaacagcactaacctctaaatagctccaacctcacaatggtatcatacatggagcactgaactaaacctcagaaagtaaaaagtcaaagaggtatcagaactggaaactctgactcccaaaccagaaacacaatacctggctgccactgtggctgataaaaattcaccttgtgtgggcaagatacctcattagcatgggcacatttgttccagagaatttatttaatgttactgatggtctaggctcatctcactcagccaaaagcaaatcaaagatgcaactgtgcgctggtcattgaactaaatggtgtcacacttatccgcagtcttaatacaacaaaactttttgagctaaaattaaccctcttttggacgacatcacatggcatatgggatccccagttcccccatcagggattccatccgtgccctctggagtcccaatcactggaccaccagggaagtccctgaaattaatctatttaagaattacgacatttctagaaaaacaatgtaataattaaataatatcattttataagaatctttcattagaactgtatcaacctcatgatattatacagaagatcccgtatgtgtgtctgtgcgggttgccaggaagatgatccagtagctccatcagatccttaaaagagagtggagtgatatatacaatgtcattgctgttctttactcattaagttacgtccaactctttgggaccccacggactgtagcccgccgagctcccctgtccatggaatttcccaggcaagaattctggagtgggttgccctttccttctccaggggatcttcccagcccagggatcgaacctgcatctcctatattggcaagcagattctctaccactgagccgcctcagaagcccacaggtaatacttcttagccataaaaaggaatgaaataattcctttttatgccatttgcagagacatggatatacctagagactgtcatacagagtgaagttaagtcagaaaaacaaatgcataatatcgcttatatatgggatctagaaaaatggtacggatgaatttatttgaaagcacaaatagagacagagatctagaaaacaagcttacagataccaagggccgggggtggggatggggtggaggaggatgggatgaattgggagactgggattgacatacatgcactcttgatatgctggataaaacagattactaaggagaaaggagtacctattgtacaacacaggggactctactcaatgctctgcagtgacctaaatgggaaggaaatccaaaaaggaggggatacaggtacacatataactgattcactttgctgcataatagacattaacacaatgtaaagcaaccatactccaataaaaatttagaaataaatatgtaaatatcaaaagaacatcagaaaacaaaataaaatcacaaatacttctagaaaaaagagagaggaatcccaaaagatgaagaaccattgctctttatagtttacaaatttctttctgttcttactggtttcagaaaataacttgcttatataaaattaagttatataattggaaatccatttcaaatctgaaatttcctaaataacctcagatgtgtgtaacataaattcacaacaaaaacacttcaacttatccaaaagttcgtaagggtctacattcccagggctgtaattagggagaaatgagaaaacaggagcactcaagaaccactgagaaaaggtaagtaaactttacctaactctagaacaatcgttatgtacagaaaacataagatagtatgattcaaggacgaagctctaactactgattacacagtctaggttgcccaaaacgacaatcaatttcagtcttctgtgttagaaaaaagtttcgcgggaaggatttgtaaaagaccatcactgaaacttcagaatgacctgggtaaaattagttccccgaattatgaaaaagtttacaatgcccacaagcccaggcaacattttgatttattttacacctgcccccgtaacttaacctctcattatagtaaatcagtagcaaaaacatacaacactgaacgatacttccttcgagatacaggctgcgaccggcggcgactgcccttaaaataaaacaatcccagttaagtgacagtagcctgtagttaaaacctacgaacctttaaatctggcaacagctcagataataacaaaaaatcccaaactaaagtcaaccaaggtaatgctgatgaggtctgtttccttccctcgcccttggggaccgcgcctctttgtgcaccagggtccgaaggtctcctaacctcagacgccagctacgcgccccggctggacaccctggcgcaagcctctggggcgcttctgctcagcggaggaaacgtcggcggatgcgggccggcgcgatccccgaagcagccgtgacgccaggcgctgtccctccgggcccgaaacgaagacccgggcgcgccgccgccggagaccgggccgcaggctggagaggaccagcggagaccgagaccgggataccgtgtgggcctgggctctccccgaaggccccaggagccgcaaagaggacaggagagcacaagaggacgcacctggcggggacccccggagaccggttcctgcgtgagcgcggcgccagtcggactctcccagcattcgccgccgcccctcctcctggccggggccacctccacgttccgctccaacgtggcagccgcagccccgcccagccggctggccgacgcttccgggagcgacgccctgccccgcccacgccgatacgcggcccgccacggcacttccgggaccggggctggagccgggccccaggccggggttctgtagcgcgtgggagtctgggaggtctcgctacgcgccgcccgtgcacttgtgagttcagaggggcggcgtgcggtggccaggatgatgcgaaaaagaagtcgcggtgggcgtagctgtctggcgggaggccggccccggccagcagaaacgccacgtagcgctggtcctgtgagacgtcagcggcccccgccacgctgccgacgcgaccggccaccgaaaaatcgggctgcaagggccttattacaaggctgttgctgggatatttcactcatttacttggttctacggtattgcttattgagcatatctttaaaaccaaacgatctggtcatacccaaaggctgttgtggacatgcttgatttgttactctaaaaaggcatgaatgtgaaaatcgcccagtcatggccgactctttgcgaccccacggacttagcccgccaggcttctctgtccatgggctttcccaggcaagaatactggagtgggttgccatttttttttgtccagatcttcccgaccctggaatcgaaccgtggtctcgtacatcgcaggcggattctttatcagctgagttaccagggaagcccctagaggcacagtggagtgaataaggtactatagttagtaacctgcgatactatttcagatctgttaacatttgtcacactgtaacttgactggtttcgccagagcctgcctgtacatgtgcagttctcttcccaatacagcagtcaacggtcttttctaaacgccttcactggaagtaaagtaaaacatagcaaactcttgtatttaagagtaggcaagtttttgtgttcactatactgttttagcaaaaacataaatgtatgaatggtcttaggcacataccagccaaacaggactgctagagttaagcacttattatttatctgctagacttgccctccacaaagataaacaaaactaatcactctgattctgtatgaattatacttagcatctggcattcttctccccctgcattctcttgtaacatttcaaaaaaggtcacaggttaacttcagggagacatgatctgattactgagttgtgtgatgccagctgtggctgttctgaaattttgcagaagaaaaaaaaagcgggaacttcattgggatagtttttgatgtgctagcctgctgtgttccctctttgcgtgccaaagaaataaagccactatttctcttctatactatttctgttcagcatcagagacaagattttggcatcagttgtaaaaccatttagtagtggtatacacttatggttcagtttaaaaagcaaatatagttagttctgtaaggctgaagtagacctactcaagaggcttacgatagttattaatttcaagttctaaaaagccttccatttttcacttaccattccaaggactagtttacctaaaaaggtgtcaataaaaacccgacttaaaagtcggaccatatttgggggctcccctagtagctcagccagtaaagcatctacctgcaatgcagtagactcagcttcaatccctgggtccgaaagatcccctggagaaggaaatggcaacccaccccagtattcctgcctggagaattccacggacagaggagcctggtggagtcagagttggatactagtgactttctttcattctgttagacaggattttgcctgcaaagtccaaatgactttgtgtaataaatttttatttcaaagccttgatgtagtagcatacaatgtgaaaagtgtgaataataattggttatgataaagcttacagttctagacttgatgcacttatatctgattgaatataaaaactcaccttgttttaaacacaggcagttctgcctttgactacacaagttgaaatggtgcagtcttaaatctatgggattaacagtaattgttaatatttaacaactattctgtgacttggcaaaacattaaaaaacctctgaggttggttataaatgtaatttataaatttttgtgtaattttgtaacttatagctttaaagtaatatttgtagtaacactacaaacattgggaattccctggcagtagagttgttaggatttgtagctttcactgctggggttaagatcaattcctggttggggaactaaagtcccagaagccacttggtgcagccaaaaaagaaaaaaaaaaaatcaaacccaacaataatctcccccactaaacaaaaaaccccaaaacaaaccactagagacactgaaagttatgttttctttctttattttaaaaaatgtatcaagtagttttgaaatgtgcttactttctcattataaaacttataatatggagtgagatgccaaggcatcttatctatgccttggcaaactgtcatactctccaagtttgaatcagcttccaaaattttatcttttaacagtcaatgtcatgatacagttctgcaagttccttcaatgtgaagttgttcaacaacatcacttcttttgagacacattcattgtttacaactgctttcctatgtaaaacttcactaagttctgcctcctacacacctagaactgtttcttgagtggcagcagtgtcaacactctcatagtcatctctatcttctaactccatttacatcccatccaaatcctgcagtttttccacggtacagcctctcactactacaaggactgcctgtaattcttggaatcttgagcgcacattccacagtaacatccttatctgagtctgtagcttcactaggtagtttaacattagcttgtgttgactttgagatgaaaccagcctttcctggcagtaaatagatgtccttgtaattaccatttccttcaatgtagcgactaacttcaatgccaaactgactggtttttgttcttgattacactacaaaggagaaggaaatgcctcacttcaaccgtaagtggctttctgttcttggtgaaattgtacactaaaagatgctgaaccaactttaccttgctcttaaaatgtggcttgtactgtagcttcatgtaggtcatggtatcatcctatatttgctttgcagtggacattttcaaagcttccaacactaattttacctgcagtgttaatcattattcatttctttgtagttcagtcatatttattgaccaattccctcttctgattatccattttggtaaaatgttccatgggcttatcactgggagacaaggaggcaacacagttacatgctttgctatctgtgtaactaacagatgttcaatgaccaagactttgaaagaagtgatgtaactgaagccattcttgatgcacaccctttctttgcataatgattctggaataaagagccatagccaagtttatgtgataataattaatattgtgacaaaacttcagctgtgttgttgtgggtcaggtgctgtttaactaccgtgtgaaaagattcacgcatgttgaaatggtgcaaaggacctgtatctaaaaaagaaaaatttgtgttggtaattcacaaaatagtcaacttttaacccaatttagttaactactagccaagccacgttctagatcaaataaaactgaagtttttctgaaatgaatgttaattctaagactctgaaatactcactgaaagaatgtttggagataatgttatatagaattcttcatataaggatttgcagacagtccaaaaacaccctttagagtgtttaaatttattgagaatttagagcccctcccctcctttcagtagtcttaaggactgcaaaagattaaagttctggataacggtactgttgtccagattgtaaaactttacaatcacaagaccatatgtgtataaaattcactgaacagcagccagtactgtgtttacttctggaaaacagtagaatccagcccattaatgtttaaattctgtttttgaatgtgttaatttcatatatcttatcactaagggccataaagtttatatcaaactttaagaaatagaaaataacttagttaaatttgagaaacaccccaagataccatgcctaattcatagcaggttaatctggtattaggtttgagattctcagctctgactacctgcctatctactgttcttgaataaagctcaagtaaaaggatgggcatccaccagcataccaaagaattatttatagaatatccaatagttcaaccaatttaaaccgaagaatatatgacctctaagaatttcagggcctgaaagaattatataattattttttttaaaagatgactatcaaggttaaaagtcctgccaccccccacccacccaacagcctttcctgaatcaaatgaaaattatactatctttgaaatattttttatctttgaaagctgaatgaggaacaattttaattaaatatccacattatgctcaatacataaatacaaaatccaatgtttttctaaaattactatcttaaaaaaaataagtttataaacttcttaccttatataaatcttcaaattcttgataaatctcacacacggtgttctctaagaaaaacacccttcaattttattcctaaaacgaaaaacatttacaggcaagtcaatgtacaaaaaccacatcttaactatatgcatcatgattttcttttcttcattatgtcctcattcacatacattaatcacaataaatcatgatgtgaacagcagtgggaaagtttaatcactggacatttgtacttattttcaacttgagctctagttttaagtttttattgcttagctcgcttttaaaaatacatataggcacatttctatagttttccgttttcgcatgtagaacagataagacttccaattttactatgactggaaaaaactcataacaaagataatttcaagcatgtcacttactactttgtacaggttcagttcagttgctcagtcgtgtccgactctttgcgaccccataaatcgcagcactgccaggcctccctgtccatcaccaactcccagagttcactcagactcacgtccatcaagtcagtgatgccacccagccatctcatcctctgtcatccccttctcctcctgcccccaatccctgacattccaggttcctatgcaatattgttctttatagcatcagaccttgcttctatcaccagtcacatccacagctgggtattgtttttgctttggctccatcccttcattcttgctggaattatttctccactgatctccagtagcatattgggcacctactgacctggggagttcctctttcagtatcctatcattttgccttttcatactgttcatggggttctcaaggcaagaatattgaagtggtttgccattcccttctccagtggaccacattctgtcaaactctccaccataacccgcctgtcttgggttgccctgcgggcatggcttagtttcactgagttagacaaggctgtggtcctagtgtacaggttagcttatgttaacttggaggtgtcttctcaacattaaccctggtattggaagagtacccatactttcctgacctgcatataggtttctcaagaggcaggtcaggtggtctggtattcccatctctttcagaattttccacagtttattgtgatccacatagtcaaaggctctggcatgttaacaaagcagaaatagatgtttttctggaactctcttgctttttcgatgatctgcaaggagatcgaaccagtctatcctaaaggagaccagtcctgggtgctcattggaaggactgatgctgaggctgaactccaatactctggccacctcatgtgaagggttgactcactggaaaaagactgatgctgggaaagattgagggcaggaggagaaggggacgacagaggatgagatggctggatggcatcaccaactcgatgcatatgggtttgggtgaactcctggagttagtgatggacagggaggcctggcgtgctgcgattcatggggtcgctaagagtcggacacgactgagcgactgaactgaacccataccttaacacatccccaaactggttacgcctcgctctgtgtgtaatgtcttttttatcagacaaggtttccaatgatcaaaaacactaaaagaggaaaagtgggagagtcatctctgctaacaaagaactttcaagcagtgatgatgggaaaagactcaaaagattatgagactccagaactaattagaattctgcctatttagaacattatgcggagaaggcaatggcaccccactccagtactcttgcctggaaaatcccatggacagaggagcctggtaggttccagtccatggggttcccaagagtcggacacgattgagcgacttcactttcactttcatgcactggggaaggaaatggcaacccactccaatgttcttgcctggagaatcccaggacggtggagcctgatgggctgccgtctatggagtcgcacagagttggacaggactgaagtgacttagcagcagcagcagaacattatgactgcttgacaaggtctatgttttactcattaaaagggacagagcccagggcagcggcaagcagcagaaagaaaaggacatattctcaccctttggggaaaaagggcaaactgctctaattctgctgctgcatatttgtatttttaatccatcctatctcaaatatttgcgtaactgcctacaggcaatcagactacattccttgaaatactctaaatagaaatttcaaattttccaagtcattctgcaccccaagcaaaataataaggcaaaggatacacaatttctatctacagtttagtgttactgagtttctctaaccacttccacctaggagcaattaggagaggggaaatgggtccaacaacaataatacttatagtatttaattacgtgggcttccgtctgtggggtcgcacagagtcggacatgactgaagcaacgcagcagaagcagcagtcaggctccaaggtggtctctgatgacccctcccctcttggtagtcacacctttgtatagtgcccacctacaacacactaaggccaacagaacagggaagaagtgatgtcttgtaactttcaagtgaatttaaaaaaaagtattaaaagacaagcttccatcttggcctttctcttagaccagtccctctggggaaagccagctatcacgtggtaagaacactcaggcagcccatggagaggctcacatggtgaaaaagaactaaaaccttcagccaacagccatcagggaatggaggcttgcaaactgaagacagtttggaagctgatgtctgttttctacctcctttccttactgtttgatcagtgtttgttttaaattgccaaatattgagcaatctgttacacagcaataaacactaacacagaaggtcagaagtgaagtgaagtgaaagtcgctcagtcatgtccgactctttgcaaccccatggactatacagtccatggaattctctaggacagaacactagagtgggtagcctttcccttccccaggggatcgtcccaacccagaatggaacccaggtctcccacattgaaggcggattcttaaccaagccacaagggaagtcccagaaggtcataatccatatccaaaaaagtaaaacgtacaacttatgaattagctgaaaatgtctaaaattcatgggcaaggatcagattcagaactgactttatactcagtcaccaataatttcaaaaccccaaggccttctgaagaacaaaaatccccagagaaccaacaggatgaaaaattcagcgagaatatgtcagttacattttattatagcaagatgacaaataaatgtaaaactagctaataatctgacaaaaagataggtattcaataaggaagataccagtcctagaaggcaaagcctctgtttttgctttcatagttgagaaaaatgtgttaaaaacaaaaaattgtgcacatacaaaacatttagtacaactcaataagcattagctgttactaatttttccccaagtaagcaattaatgagattttataacataaagttagatttcactcaaccctttagaaatatatgttttacttgggcaatcctccccttccactcactgcttttgtaccaggaatacttaatatgctaaaaaaaagaaagatattagactacctcccctgcagttttagtaattctcttccaagacccaggaatctttttccgacatcttcaagcatacaattcctgaaaagagatattttatttcaaattattttttgcactggtcaatgctttctacaaataatatctttaatacagcttacatatcctcattcatgtattcagtaatcacataagttcattatgtgaacagcagtgaaaacatttaatcattggatatgaagctatcaaaggaagcaactgctaactgctaagtcgcttcagtcgtgtccaactctgtgtgaccccacagacggcagcccaccaggctccgaaggaagcaaagatataatcaaatgatgtaattgagaacttcagtgtgaccaggaaaaaaaatgaaaaatagcaacaaaaagtatgtaaagcttattagcaacataaatacaactcaacatcaatgaatccatttataaaggattgcatgcttccctatccagaagcacactaagtatacccacagcagcgaccccctgtggctgtaaagtaacttggttactttcattgagcaggtgtgcatttaagtcagttgttccccaacattgcagtcttctgaaacccatctgtaataaataattagatggatactgtcaagactttgagagccacattctcatgaactaattcagcaggaaagaaaaaaaatcccttctttgtactctgatgctgaactggcagctctagcttaagaaaatgaaaaatgagtgcctgcacctggactcacttaggagcagcacccacctccgtgcccagctctcagcaggttagattatccctgaacccatcttaacagcagccgtttcgcccagggctctacttccatcagaaatgtccaacacccacaagcattgctcttttagtactccataatggcaacttttaagtctccatttaaagttacctttaatgggttgaaagagcataagcgtacttcgctggtaaccaatactttttcagttcagttcagtcgctcagtcgtgtccgactctttgcgaccccatgaaccgcagcactgccaggcctccctgtatccaactcctggagtctactcaaactcatgtccatcaagtcagtgatgccatccagccatctcatcctctgtcgtccccttctcctcctgcccccaatccctcccagcatcagagtcttttccaatgagtcaactcttcgcatgaggtggccaaagtacaggagtttcagctttagcatcagtccttccaatgaacacccaggactgatctcctttaggatggactggttggacctccttgcagttcaagggattctcaagtcttctccaacaccacagttcaattgcatcaattctttggcgctctgctttcttcacagtccaactttcacatccatacatgaccactggaaaaaccatagccttgaccggacggatctttgttgggaaagtaatgtctctgctttttaatatgctatctaggttggtcataactttccttccaaggactaaactgaatactacataagcatattataatagaaagcaactgtgaacaataccttgagataaatcttttcagcgaaaatctggattaagtaacaagggagaaagaacaaccttgcttggaaatgttgtactcattcttgcagctagagacagaaataaaaaagttacgaacatttgttttctttaatgagcctccaacgttaagcaggaaagatgctacataacatactaaggacctcttcaaacatacaaaatagaaagtacgcctcaccttggctccattttgtttcttctgtaaaaacttaagtctcataccgtaaacataaagagcttaaaaaaagacatcgttctaagatcttctcactcctgaaaactatccacgatgccccacatcccaagcaaaaccattttactgccctctctcctgcccctcctagtactctattgaagagtccctactaggccgtgcgcttccccccaaacccccagaacctttttaccttatctccttcgtaatctccattgaggcaaaggatcttgtaggaaagagctcgttgaattaaaaaccgacttatcttggtattaaattctcattaaattctgaggccacatacctcctctaccaatagctccgacattatctccgcatcagataactccaaaataaaatgcaagaaaatgacatgcctcccattaaataatttatttgggttctaattttgccttcaatatttctagggcgccacgttcatcctttcctagccctcccgtcactttcagagctcgcaccttgagacccatcggcatgcctctggattcgcctcaacttttgcctgcctctcccccttcgcattctctggccgagcctcggaataagcgcgatggccctagatttcaccaggccggacgaaaaacagaccattccagcgaaatacacttatcaccctccaacgaggagcgaggggaggcccagagattgacttaataccccccggcctttccgattggctgctgcgacgtgac

SEQ ID NO: 243 - DNA, 28197 bp, Hippotragus leucophaeus
  source 1..28197: mol_type = genomic DNA
caacagttaactatatcgtgctagttataggtataataaagagtatctaacatttgctgggtgcttattaagtgcagatcactgtccttggtaacttgtatccatcccatttaacccttgaaggtagctaccataattaaccccattttacacactagtaaccgggggtgcaacatcacacagctgattagtgagtaaagcaagaacaggcatgtaggtccctggagtctggctgcagaagccaggctctaaccactaggctgtaaaacactaactcatttttttgttgttaaaggggtatgggggggttgggggtggggagtgatcagtattttaactagttggcctcctaatagagttaggagaatcaaaatgaaagctagagaaaggaagaaaacaagactctgtaggccgaacagaggccataacccattcttttgcttatcttcaaacttaagagctaaagcagacacataagagtttttaatttgccagatactcttttaatgagaattataaaagaccaaaaacatttttttgcaaactgctttttaaacaaatgatttgcttttaattacaaatactgtgtgagacgatgccttcttttgcaaaaccaataaacacaagaacaaattttaaacatatgtgatttgtccaagatatgtgggggggggcaagggggagcctgatttttttttccccagtatttaaaaaaaaaaaatcagtactccctaaaccttacaaagaataagtttgaaggtatgactcaactggagaagagagggagatcattttatagctgctttaactagtttctgataattcttctgatgttatccttcctgctttaactagtttctgacaattcttctgatgttatgtttcctttctgaaactcatatcttcacaaaacagttgaatttaaaatatttctaatgaactgattaatggggaaaagaaaatatgtattgaacacatgtataaattttaccatcaacaattatgcatatcaaagacactaactttaaaaggtacaaaaaaaaaagtgaggaaaaacctgaattacagaaaagaaagtcaaatttatttaatgaaaaactagaattaataaaaattagcaaatacacacagaaaaaaatatacacacacagcagcactatgtattgactcacataggggaaaagcagtggtccaagaccactcaacatggcttgtcagttaaaggaaaaaaaaatccaaacacactcacacgcgcgcgcacacacacacacacgcacaggcacacaaaaaaacaagaacccagtatttttcaacggtacactcaatctacaacaaacacaaattcagaattattttacaatgcttcctttcttaatacaaaagatgcccatcttgggtgtatatatatatatatttatttttcagtggtttactgttgacttatttttaaatatattagtgttattacatgcaactgtttcctgtatttaacagcctttccttttatttaccttcatgtgtctagcttccacctaccacaagtttttggttggtaggcagacaggtgccttattctctgtgaaatcaaatgcaatggttttaaacactggccagaaaatgtctgattgccatttcaacacatggaaatagttacattgatgcctaaattgccattttctgcaaagagctgtgcaatgctggtgtcaaagactaggcagtcactattcataatggctgttgcaattccctcatgaatagatcgaggagtggcttcccaagtcaatcgtcgcctatgaccatttagctcaagtcgataagcaaaattttcagcttgcttgcgtgttcctatcagctgtacaattgcaaagaattgctggtgaccatcatatttttcctgcttctccaagaccaacatgaagtgaaagccgaaacaggactgcatcatcacccagtcaacagcaccaggaagattaatgtctgtggcaaggaaaactatgtcctctccctgcagggttgtgatggacttatgctgatgcatcagatgcggcatgacagcatccagagagccttgccatttacaggaagcaccagggcacgggcaggaataaggcctaaactcacagagctcttcgtggtctgctttttctgtgtgtggcagagttatttcacatccagaagaggcgtatttacaagggaaaagtactgaattggccactttctccatagccaagttgcgaatggatcccaacgggccccggcaagttggacaacatgtgagctttgggcgacagttgctgcaaaccagatggccactctggcactggagaataggtggcagcacatagtcgaagcagaccggacactcaaagaggctcgccaggtcattgttggaggcagttgtgcccgtcaaggcaggcaccctctgggacggcgcacactttgaggttccagtaggtaatgctgttgcagtctgacggctcatttctgtaataaaaaacacaaataaaagtataaggaggcaggaaaaattaattataactataacatgttttatataagtaacagttgcttgcctaaaatacttaagtttagtgcaaaatttgctgtaagcaaaataaagaaaaacaaacagggtttaaaacaacatagattacatgaaatatgtgcactgtacattggataaaatctgttttcacaatgttccagagcacattccctttttctaaatgtttaaaaaatcatccttgaatggactacatggaataaatgctaaaatagaaacttggatcctaaacaactaaggaacactgtataaacagtttaagttcaatgaaatcagttttgactggaatttcccctgcctgtgttcaactgccctgctcattctatttcttccccattcttaagtcagctgttgacagcctcagtgagttatacatgatccaaaggatcaccagggtactgacttttgattactctttctaagggtgaatgttatctgctcaagagatctatctggggaagggaaggtctcctgccagcccatcatccatctccatggaatgttaacaccagctagatcttcatcttatttcctacccatctgtgacccccttcaaaagtgaggaagtatataggtgaaatagagggccaccctctaaaagatatgagtctggtattcagaagtaaatcattctgttctacttccattctacaatattaatcaggtataatctgcaaagaggaaggaaagttaggaaaagaataaacagtatcagagagactcacacaacattaggggtgagggacagagtcaacaggtaaagaattccttatattctattatagagttcaccactgttgctgaagcattcatcagcacagtactaaacattatttaagaaataaatgccatctggaagaaatgatcaacagcgttaactaacctgtcaagctgagttaaagataaaacaagcaccttttcccaggatatagtgcgctgctttcttggggatgacaaaaaatcagtccactaatgtcctaagagtatatactcaataaccacaagccatatctctacaaaatcaaaatttaacaactcctaaaagttagtttccttaaatataattgttattctgttagaatttaacattgcaaaaataatgctagttatcaatgagaccacataaatgcaatttgggttctattactcatagacagggcgtcccacgtggctcagtggtgaagaatccaccggccaaggcagaagacacagtatcgatccctgggtccaaaagatcccctggaggaggaaatggcaactcactccagtattcttacctgggaaattcccatcgaccaaggagcctggtgggctacagtccacggagtcacaaagagtcagaccccatgcactgatcgactgagcacaagcacacactcacagattactcaaggacagacaccttaaatggggattgagagtgaaccctctcccccaggaaacctcaaaacaggtcaattccactgtcactaaaggaatattctagagttcatggggaaacaaaattatcacaagaattctatcataacatggctcatcgcatagatttaagacaacaggaatcaactctcatcactgaagctctgtataaccaaagtgttcaagcccaacaaaaatactataaaggaactttcatgaaatccagtttacttctgagattttttctgcatatgatgatccatgcattttattttaggtcactagtaaaacaatggcttagcattgccgaagtgtcctgtatgtatgcttatttcatggtccattttatgcagctcatttaagagagcaacataataactgggaagtaattccctgggcacaaaatctaagctcattcctttcaaatcactaaaccaaaaccagctggtcactaaactcagtttgtattcaacataatataactactaagcaagaaaaatattactgtttaattttgtgacctagaaaaagttataattttatcaatagtccagactcacaatatacattattattttcccaaacatacaaagcacaacttaaaattcctattcaaactgtgaaaacaagcaaaatatggcttcaatttctggtgaatataagtattacaggacagtagctgctaaaacttcccaaagttcggaaggcggaactcagtccatcttacacagaaaaataatccaaacagagcacagcagccgtgcagtaggaaccaaggactgaagtgtctggacagctctgcagcagtcatgacataacctgaagtttggtttaaactgagaaaagcacagctgatccaaagaacatcactgccagctcaattttgttgcagcaattccctggtccgtttcagaggctcaaaacaactttcccattccacagtttaagcaacacagtctcttaatagcagtaccttttctcttccttgtcccagatgctggtaaacaagtgagcaagacgcctctccaggagtacagaaaaggtaagggagacttcccggtcataagtcagagagctcatagcctttcccccagaagcaaagacaacttgcaacagagggctctcctgtataccttctgttactaaacatgtcccgggtctagttttcaaaagaaggcacatgccctactccatacactccattcactcctcagaagcactggctactgaagaagagaactgatgccccctcctgttccaagaggagtcgaccacacctcccaaggagctgaaattcgcctgcgtctccaaaaatgggagccattgctgagctgtcctctgctgggccctaaaccttcgtctgtctcggaagtctgtcttccccaaattcatcggctaggctcctgccagctcggtgaagaacagggcagaagggtacgtagaggcgactggtcgactacgtgcgctctcggtgccagctcaagctactactgcaggatccggcccgcaggaggaaagcctgggccaacgcagtgccggggggccgcaggctctctctgcacagggcggcggctgccgcggctggcgagaggcggggcggcgtgcgggggcggggcttaaggctccgccccactccgtctggggcagctcccaagcggctcctgggcaaggagcgtgcaactcccacccaggcacccagccgagtaaaaccccacgatcctcactcccaggggatactgcgcaagccaccagcttactaaaggctgaaacactccatttctgtaggcccaaacagtcggatatcggcaattttgcatggtttcaatccaaaaggctacacagaatatatgcaaaatacgcgaccagacaagcatctctgcactatactctgccagttaaccctgcggacgctagatttttacgaagtaaacgcattctccgtacttcgttcaataactatttaacgggcgttaactaccttatctccacaactgtaactcacttctccacaactgtaactcacttctccatttttaccgctgtcagcactttaaactccttctcccttcgagaagattttgtagtgagagtagtaagcacacatcaccatattaaactcctgctttaacctccaaatttagattttattctcttcccactctaggaaaaccatcttaaacggcctcattaaacagagtagcttgttttgtttttacataagcattacccttgccccaataaagtccagggcctccaatctgcattgcgtcagctcaggcattcagaggtttaacctgtcattacatcatgcttagtgcagcctttaaaggctgcaacactgcaagacctggtgtggggtgtgaaccctgtgctctaaattggccattttcagcataaaattttaactcttgatcacttccccaccctattagtagtgtgttcaatcacctcaatgtcattttggtattaagctacagaaaacatctttaggaatagaaatataactgaaaatagtctggtcactgaaaaatataaattacaataatctatgttttaattttctaatacatattcattctagataggtctcaggtttctagaccaggacacttcaaatgttttagagcagaaaaacttcagacagatttaggacagagtccaaatgtgtaaaaacaagtaaaagggatgacatttctcaagcaaaaaaatgttttcccaaacttccaaagaacctatacaaaaagaacctatacacaaagaacccatacccagatccttacagcaccatctaaaaatcattaatctgtggacaaccctctgaacaagtgagtcaggacagtaacaatggaagtgttctggagtcatctgcacttgaattcaaactcagccttcgccacctgctcagctgtaaaactgggacaatatttctagccttgcattgcttttgtccagattaaggaagatgggtaagttatatatatcataggtggcacaaattccaaaatatgtaagtgctcacttacagaattccaaaagttaactttaacttgtctgacctaaagtcatcaattaagagacctagaacttgtgggttccagatgtatactctaaaagatgcctttagctttaataaagttatcaaacatgtctaccaaagagcaattaccattttaactaatttttagcacaatatagtagaatttctcgactaggtagaacatttatttaaactggttttatgagataaatttttacaaaaactacattacactaagacaagcccacagaatccaaagttagcaaaattccaaaatttatcaagagtccactattacttaccctttctaaaataaagcttacatctcaggccccgtttggtataaagtttagactttaacttaaataaaaacattttagaatcagcctttaatgttgccttagtaactttagaacatttaaccattgctatgccacattaacaaacttaccactgaagtaaacagattcaaacttttagtctcaatttcatatgggaacgtttgtttcctattataaattataaacaactaatgaacaatttctctgattaattgtaaccttgtgccgggcattttaatgaatatacaacaatgctgtgcttttcattttcttgcagtttttacaaatgttaccatgatgtgcaaataatgacccccctcaaagatgcccaccacaaaattaaaactatggcaagtctccttaaaaattcaacagcttaaaacgctaagttaaaaatcaaacttcattataacacaataatgcaagcgggaaaaaaataatcaagcaatctatttttagtttccagaactgtaccttactaatggtaattttaaaaaattgtgcacagtattttcctaaaagctcttttcctgaagataattcagaaaatattgtagctacaaaataagatttatatttccaataaaagtaatgatctgaagtgggggaagtccaggacaaaagacctgatagaagatgtaaaagcatcggtctgaacaaaggtgatgacagtaaatggagaggaaaatgcaaaccataacttaaatgtataaagcatatttgttttttactccctaaatcactgtatttgaggcttctatacttagtaaaaaaaacaaaaacaaaaacaaaaaatacttaaccagaacccattaggcactatgctaaataccaaactatggtaagagatgaaatgcaaagtagaaatgagatgcctgtgagatatctaagagatggaactcttaacctctgctgatgggaatgcaaaataagttatcaccatatccttgtcattgcagaaagtcccattggacagcatgattctatatcctaattttacttcactattttccttattatttttatttcacagtgaatctaacctcaaaatgaaattaacctcaaaaatgaaaccataaacatctcccaaaacaaggcaggtcaaacctcaatcttaacaatctgaagctcttgcataattgcacaagctcagaatttcagtcataccatttacccctaagaattacataaatcctgctgtcttctgataagtaactacagagatcaaacatctaacctcacttttattcttgttcctctgcaagtaactttcctaccctaacaggtggcttctaagactcttatctttggaagaaattttcatcagaacatctagatatatgtcatcagcacaagccaacagcaagtattttccatctcaaggcaaatctttcacctttgtggaccttgcctctaattgttcttttttaactcttaccattactcggttcttttcttcatgtaaggctgatactgactctcctgaatctatcttcaaaagttaatatattttttctcattattcctatccttgctttgtactgcattctaagagaactcaagttctaattcataaattcggttttgctaaggttaccaatctcctgatatgctaaagcatttaattatatagataccctgaaccaccaacaagggagcagagtatgatggaaagaacggctgcttccctttccttcccctgaagttggaatggccacataaattcagattgtactgctcttgtacttccttaacctctctattaaagtttccatgtttaattttcatgtccctcattgaagcgtcactgttggttagtggttttgttctcactgctataacctaaatagttccagggtcagcaaactaaataaataaggaggcagagaagggacttttcttccattctcactaaaacagatcccccagacgttcattaacaagcatatgtatgtaccaggcattgtcctcaatgagcttccaaggtaagcatttatcccccatattacagaaaagaaaatggatctcaaaataaatttcagatcacagagctagtttaaaaaagaaaaaaagggagctgaagagctatgtgactaaggaagactcagaaggagtggtaaatggcatcctaggccaacagacattataaaaaaattttagacttggaaaagatcttaaccaactctctcattttcagaagagaaaaatgacacagaacttgctaaatgtcatataaagtaggtcaatgttctaatctgggcaatgttataatttcctagatccttgtaaagcaaatattctttggacattttctaattcaacttgaaaaattaaccttttctgaatttaagtttagtaagattcaaccatcttttgctttccctcccaacacaagaaggatccctaatgtagccaggaaagagtaaataaaaaaaagatgggagatgagtaagagtcagcaccctagaggggcctttcctaaaggccagatcactcttcgtactgtcttcatattatctcttgccatatgaaattcacttgctaaataatttcttactacttattatctgtcttctgtccttttccctctcctcctcaataccagctttttgctgaaaacagcaattctcaaacattttcgatttcaggaaccctttgtaccagtaattggcaaactacagctgcaggccacttgcctgtttttgtaagtagttttactggaatatagttaagcacattcacttatatccaggactgtttccaagggtggagatgaaaagaccctatgtatgactcctacggttttccctggtggcttagtcggtaaagaatctgcctgcaatgtgggagacccaggttcaatccctgggtcaggaagatcccctggagaaagaaatggcaacacacgccactattcttgcctggaaaaatcccatggacagaggagcctggcaggctactctctgcggtcacaaagagtccttggggtcactaagagacatgattgagcgactaacacttttcactttcatgactcctaaagccctttaagcctatctggccatataagaaaacatttgtctatactgttttaaagtttttaaaaattgaggatcccaaaagagcattttgtcagtgtggtttatatgtattaatttttacaatattagacattcaagtcaagaactttaaatatgtgttaaaattaccatcacattttttatataacatgtaaaaatctacatgttaaatgtttatggaaaatatcttccataatagggagaagagcatctatgttttatgtattttgcaaatcttttaaatatgatacagtaagaaaaacaaaagttggatatttaatatctgctcagctgcaatgcaggagaccctggtttgattcttgggtagggaagatcctctggagaagggataggctgcccactccagtgttcttgggcttcccttgaggctcagctggtaaagaatccacctgcaatgcgggagacctgggttcaatccctgggttgggaagattcctggagaagggaaaagctacccactctagtattctggcctggagaatttcatggactgtaaagtccatggggtcacaaagactgggacaccactgagcaactttcactttcactttatgccattaatctgtgaagataccatatgtcacgaagcctctgggaacctcattttactttcatgtctcattattatgaaaaacagctttgacactcaaagggtcttaagaactcccagcttccctgaccattaacttctcattcggaagctctgcagaatataagcttcatcagaacagactttgtttattgtgctctctcttctatctccagcacctaggacagtacccagtccagaccaggtactcaaatatttctgaaagaacaaataaatcaagtacaacagtatgaaggactagcatgtgtataaacagacctcactcatccctgataactcctcggtaaaatatatctgttgcttgatataaccttaaagagattcacaaaggtgaatgaatctcaattcacaattgagacttacaatttactttaaataacagtattttacaacaacaccatgcttatctttgacaaaggagcaaaaggcaacaacacaatgaaggaaagagaagacttcaacaaatggtgttggaacagctgggtatccacaggcaaaacaaaagaagaaatctagacacaaatctaacacctttcacaaactaacttgaatcacaggcctagtaaaacagaaaactataaaaatcctagaagataacacatgagaaaatatggaagacttgggtttggcaatgacttttcagaaaaatcaaaggcatgaacccagaaagattcatcagctggacttaaaagcaaaaatgtctgctctgtgatatgatcaagagaatgagaggacaaaccacagactgggagaaaatgtttgcaaaagacatatctgataaaggactgtcatccaaaatattgcacagaactcaacaagaaaatgaatacgccaattaaatggcatgccacaaccactgaagcccctgggcctagagcccaagctctgcaacgaaagaagccaccacagtgagaagcccatgcaaagaccagccaccactcggcccaactagacaaagcccacacaaagcaatgaaaatccagcacagccaaaaatgaattaaaagggaaaaaagtgggcaaaagactgtaacagacacctcatcagatatacggatagcaaaggagcatatgaaaaggtgctccacatcatttgtcagcagggaaatgcaaattagaacacaaataaaacactaccacacaccgtttagaatggcaaaatccaggacactgaaaacaccaaatgctgatgggcatgcggagcagcattcattgctggcgggaatgcagaactgtacagccacttggaaggcagtttagcagtttattcaaaactacacagataccgtgagattcagcaatcaggatctccaaaatttacccaaagtagttgacaacttatgtccacacaaaaacctgcacacagatgtttatagcagctttattcataattcccaagatgcggcagcaactaagatgtctttctatagtgaacagataaactgtggtacattcatacaatggaatataattcagaaattttagaaaatgaactatcaagccacaaaaagatatgaaggaaccctaaatatgtactgcaagtgaaaaaagccaatctgaaaaggctacatgttgtatgattccaactatatgacatgctggaaaaggcaaaggtatggaggcagtaaaaaaaatcagtatttgccagagactgggtgagaggggacgatgggcagatcacaaagcattctgagggcagtgaaatgaccctgtatgctatagctgtggctacatttgccaaaactcatagagcactaagttgtttctttagccactgagtcgtgtccaactcttttgtgactccatgaactagacagaccaccaggctcctctgtccatgggatttccgaggcaagaatactggagtgggttgccgtttcctcctccaggggatcttcccaacccagggcctgcactcgagtttcctgcactgccaggcggattctttaccactgagtcataagggaagcccacagcactaagagtgaaccattaataatgggctttgcgtcaaaccagacaccacaggtcgcaaggaagacccgcatactgccatgaagatcaaagatctcacatgttgcaactaagacccagcacagccaaataaatttttaaaaatattaaaaaaacaaacacagacttctggacattaactaagatcaagtatatggaaacatttggtatattactaacaacacttgcgacaaatcaccaaattaaaaagacccagattacccaagattttactgaaaactgttgtttcaacctattgtattcattttcataacctcagcctgggaccatgtctgaaatgtgataaagacaacaaagtctgctatgatagaaacttccaactgaccacctaccaacctgtaaagcatcatgtcaggagcttcatacagtctatattaataaaggctgtatctccattttgcagatgaggaaactgaagatcagaaaaataagtagtaataagaacagagccagactgctttgtccctgaatcttattttctgtcaaataaccctaagaaaagtatgtataattttctcacttttacacagaatattacaacttcacatccaactaatcttcaatattcataaaaactgaccaaaaaaaaaaaaaatccctaaattctttaaattacacctgtagtcatagcaagtagttgtttttgaatttttttgtattaaagtggaataacctaacagtcattaagcaattagacattaaatcaaaccaaagaatcaagaagagaagaggagaaaaataagagaaaaagaagcagggtacttctgtggcagtccagtggttaagactctgagcttccaccacaaggatctcaggccagcccctggtcaggaaactaagactgaactaagattccacatgctgcacagcaaaaataaaagcagcaggaagagattaaataggctctcaacctttttaagtcacaccacatatcactaaagagaattttggggaactcacttgaaattattgaaaccataccagtcataattacaacacaatcacttctgcaatatcaccaagactcacagtgtctagataaaagcagccaaactctcatcatttagttacgtaagtttgaatacaactgtttactaatctgattgggctttatattctctcaggatgtaaaactgtcacacattccaggagatctttgctcttttgctccatcttgatgttaaactatgttttcaaaattcttccctgtatcttgtacccagttttacactttaacatacaacccatccaccttcactttcttcttgacaagtaatggtaggtaaatacacagagaacaaaaattttaaagcagatcaacgctggcagtaacctacaaagagttggtgatactaagctaaacagaaaagaacacacagcttgagagacaaagaaattaaatgagataaaaggtcttatctgaagagtcttaatacattacatgattgacagttctttactacatttatagaataatggaatatataggggaaaatcccgtattaaaaaattcatggagccttattcaaactaaattatactcctctgaagtagttaaagaagctttcctgatggctcagatggtaagaatccgctgcaatgtgggacacctgggtttgagccctaggtcaggaagatgctacccactccagtattctttcctggagacaaggagggacagaggagcccagcgagctcacataagcatcccatctcaaactctagccaaatcattttagttactttgaattaacttagactctaaatttcatcaaactaagattccattctctgggcaggtaccacatttctctacaaaaacttttctgttttattctcttgggttattttaaaaacagcgttagcacagtctcaatcatctgaatccccctgctactcatgtaagtgaatgctcctgtccacagttacagtcacactggtcaaaagctggtactaacagtactctagttacgggaagttaaagagaaaagtagagggggacctaatccataagtgatgcacttgtgtgaagtgaagcccagatgacaccatggttttcaccgaagcactaatacactggtaagaaaacgcatcgtgtggtgaccacacatacgggataactttggtgtgctcaactcacgaagaacctgcagcgtaagtcaattccataagtcatgttgtttcaagactgcaattttgcaggtagtattcgatagtttcataaattagtgtaatttgaagtttactggctttgcagttttgtttttatttaatttgcaagttttgaactgccaccaacatcagacagagctgagcagatccctggctcctgctgggtggactgtcaccgactctacacactctcggttttcctgcctcactaggtgctcctcagtttcctttattgattcctgctcttctccccaaactcttgatattagaagttgtccatggtccacttttcttcactctggtaatctcattcactcttgtgtctttaaaatttcactgatattgtcgtggacctcaacatttttatgtccagattaggaaacaaaaaaaacccctcccagatttgtctttaactacggatgtgtacacccagctgtctcctagacattcccagagcttgcgtgcacagccactcggtcatgtccaactcttcgcaaccacacagactgtagcctgccaggctcctcagtccatgggattctccaggcatgagtcctggagtgggttgccattccctcctgcaggggatctttccaacccagggactgaacctgggtctcctgcattccaggtggattctttaccatctgagccaccagggaagctccagacatttctacaggagggtggtcaaaactgaattccttatcttctcccagaatactcaaccaatagccttcctctcacttcatggaaacttcatccttccagatactcattccaaaagtcttgaagtcatccttgattcttctctacatatcacatgtgttaccaccagaagtcttgtacctccctgagaaatgaatccagaatccaaccactcctcatcacctctactaccactgtatcattatctttcaactggattattgcaatacccttctaaccagtcatcctgcttccatcgttgtctcccaccccacccaccaattcagagcacggcaataagaaagaaaatctattaaaatctcccatatccaggtaaaagataaatcctacaacagtctacaagaccctgcacaatgctgacatgtccccattactgtctgacttcatttcccacctcctccttcctcactggctgactggcatccttgttccctgagggtaggttgctcctttgggtctctgccttagaatacttttctccgagatatccacaagactctcacctccttctaatctttgcttgtatacttccttctcaatgagggctatccagtctcctctatttaaataaaacagtgaccacactctgcccactgaccccttctcctaatccttgctcattcactgttgtcaatctttgcctctcctcctcttccttccccctcctccatttctactctattgttgtccataaaatgtactaccatctattaggctatacgatttacttatttgttatggttgttggcaatatggttgttgttgtaacccctcctccaccacctggaaaatgggaatttgtctggttcaatgatgtgtcccaaacacttccacagtgcctgacacatagtggaggctcaataaatatgttagctgaataaataaattagaaagcagaagagctttggacttctgagctgctgctgctaagtcgcttcagtcgtgtccgactctgtgcgaccccatagacagcagcccaccaggctccaccatccctgggattctccaggcaagaacactggagtggattgccatttccttctccaatgcatgaaagtgaaaagtgaaagtgaagtcgctcagtcatgcccgactcttggtgaccccatggactgcagcccaccaggctcctccatccatgggattttccaggcaaaagtactggagtgggttatccaaaggtagatgtaatagagcaatacttgttaaaatccacaagaaaatgattaaacacagagaaaacagagcagaaaggacaagtattaactacaaggaaaattatacaaataggtccaagaaaaagtaaccatttaccatatggctcaaattgtaacttttacagtcataataatgcaaacacaaaattacgctgttactaaattaggatagtataggaatggtaagggtctgtacatgtgacaagggcaggaaagacagttagacacacaacaggagtaaggcctaaaactgaaatcctgaagtaacaacataagcatgtaatctagagacaatgatggtaaataaaatataatcacttcaaagaggttaaagtagttgcctctagaaaaagacatctggagagaaatatggcagatagtttttcttaaaaaaaaaaaaaaaaagcctagtggaatatttcattttggattattttgcatgtgcaactctagactaaaagaagttcaaaaacttgatatgaattgtcacaaactgcatgcattacttaagacattacaaatataaatttgttttcaaagatttgattccaagtattggctaagatctgcggaaacatactttccctacactgttggaatgtccacgatgaaggtttctaagaatatttggcagtttgtatactctctgatccagtagtttttctttcaagagtctatcttatgacttacacattggcaaaggtgtgtatatatatggatgcctacagcaaccctatttgtaagagcaaataaactgaaaagtgttctagatgaagaaagtgactaaatgatgatccatacaacagaatagtatgctgccttttttttcttttaaataaacagactcatacctactaacatataagaatcaaattgtttaaacaggtagagggaaaaaaagcccacagaatatactacaatcccatttatgttagaagagaaaaaagagatagctgtctttttatatatgtacgcatgtacatacataccatgtaatgggacagaaaactagaagggcatccaaattgccaaatgtggtttaaagacttatggtaaggaattagaaaggggggaaaggaggtcaaattcagaaccagaaatcacaaagactagagttggcaccactgaactacaaacacatacacaaaatagccagatggaagaatatacagactacagagtatacacacaaatttcaccatctggaattacgcagtttagggaagcccctcaaacatgtatagttactgacaagtagtaatcatttaaagggaaagtatctacaacgattaagtcagatcaaagaaactgactttaaaatgtctatcttaaaagaatgtgtaacacacatagactagaaactacaccaaaatgtccataatggttacacttttcaattaccacattaggaatgatcatgaggaaggtgggggttgcatttctgtatgtatttctcaaatgctccataaaacatatgtattactttggggatttaaatttagtgcctattttgtgtccccacacttttctgctaacgaactgctagtgatttcacacaaacattaagagatcaagagttgattttgcctactgctttctttttttcttaaaatgcctcaaatagatgaatacttacttatagggaaaaattactttaaaaacagcctcttcacatttttaacaccctacatatttcaaatacatgtacatattttagtttatataaaaaaaacttaaacttagcacgtgacaaaatttatctgatcaccactccaagcaaaatcaaaagaatgtctgtagaaattaactcagaaactatctgtattaacaaaatatccaaagctgtccccaagaaagctaaatcagggaccctgacaaaacaaaacaaaaaaaactacaattcaactttagctgagctcaaaagagctaaaaggtaaaacacaaaggcaggaaaaagcaagtttttaacaattagattatttcatcaaatcaagaactgaagtacaaacgttagtgtacaacacacttaattttgctgtatcaaccattactaggctaagcctgtcaattatgacaataacaagtacaatacttcctataaaattcaagactggcattaaattcttctcattttctaagaaaatatttctcactggtagtaccagctttataaatatagattcattctccagagatttttcctctatttctttttctactctcacatgctcccaaatcccctgctattcaaaataagcaaaaacaaaagccacaagtaagttcaacatgactgggcaacctcaaacttaaaagatctttgccaatatcattttggtcactgtggttcaaacctggagaataaattgaaccctaatgaactgttttacctgttatcttttagcctagagttctggaagacttactcctcctccccacaaaaatcaaaataaaagtgatgggatacatgggagctggtcacaatagtgtgcaaaatgcgttaagttgtatccttaaaatcttgagcacacttctgtatgtagttatcccatatgtcttcaaaaaagtttacattgaggggaaaagaagtaatactccaggtattctacaatctcctgagaacagtaagcatcaggtgtcatagctggtgacatatcacagaattttctctcccagcctcggctcagtttctcactctctactatgccttcaaccagctgtagtacagtagtcgctaactatgaacactcaactgatggcttcactcatacttcctttagaaaatacaacagaagccatcaaatgcagacttgccacttccttccctcttagaatggaagaagtgacccaggccttcgggcagtgtcctctcaccccctcagacttcacacttctattccccactctgccgcattcaactcgttttctactggcccattccctaacacctgaacatgctctagtacctcccatctggcttctgtgatgttcctctacctcaatggatcattctggatgtctcctagatacctttaaatccagcagatcagaacttcacgttgatttgctgtccttctgttttttgagttttattgttatctgcaaaccccctcctagttctttcattcctggtaaacagcattatgattcacagttgctcaagccagaaaccacctaattctttccttccctcacctctcatatctaatccatcagtaagccctgttaattctgtccccgaaatacatctcgaatccatccacttctcttcatattcacagccgccaccaccttaatccaggtcataatcaactactgtgctttctgatctaagtaaacatgttagttgtgcactcaggtccagctctttgcgacgccacggcctgcagcccaccaggctcctctgtccatgggatttcccagggaagaatactggagtgggttgccacttacttctccaggggatcttcccgacccaaggatcggacccgggtctctggcagcgcaggcagatttctttactgagccaccagggaggcctgatcaaagaaatggccttcaatgagctaggcatctgggctcagccgtgtccgactctttgcgaccgcatggactgtagcctgtcaggctactctatccatggaattttccaggcaagaatactggagtgggttgccatccccatctccagggaacctttctgacccagggatctaacccacatctcttgtagctcctgcattggcaggtggattgtttaccacctgagccaccggggaagccccccaaagagctaaagcaatcttaaaagaagattgttactcctttaattaaaaccttttgatagcttctcagtatccttaaaattcacattccttactttgactgcaggatccgatccttgcctctctcccccctcatccatttgatctagtgataccctcttttctcagttcctggaacagcccatgttcatttttgcctcagggtctttacttctgctgctccttcaacctcatattctcccttctctccttcaaagaagtctttatccttttaacatagcttaaatagcaacgcagggcttcccagctggctcactggtaaagactccgcctgccaatgcaggaaacacagatttgatccctgggtcagagagatcccctggagaaggaaatggcaacccactccactattcttgcctgtgaaatcccacggacagaggagccgggcggactgcaacccatggtcgcaagagttggacacaacttagcaactaaacagccaatatcaccatttctcacagcaagactccctcccaccattactctttcctcctttatagtatgtatcacaatttgtaattctgctttcttcccttaccagaatgtaagtagtaacagagaaattaagtaacttactcaacaactaattttttaaattatttaagtactttctctgttaagtaatgtgtttttaaatgcaacagtaagcactgtccctgctcttgcagagcttaatgtcacaaacaaccagtaacagatgctagacacacatccagatctggctcttaaccacttggcgacactgcctctagctgcaggacactggctcaaggggcagcaatatgcttagtagatgctcacttgctaatggaaactaaggcttggagagttaagtcatctgccccaaggagcacagacagattacctgaggaattaagtacagtcatgaaaaaaggcacagatacatttaagtatggagaatgttcaagaaacaaaaaaagaatccagtttaatcaggcatggcaaagaagaaatgctggaggataaggctgctgctgttgctgctaagttgcttcagtcgtgtccgactctgtgtgaccccagagatggcagcccaccaggctccaccgtccctgggattctccaggcaagaacactggagtgggttgccatttccttctccaattcgtgaaagtgaaagtgaagtagctcagtcgtgtcccattcttagcgaccccatgggctgcagactaccaggctcccccgtccatgggattttccaggcaagagtattggagtggggtgccattgccttctccaggaggataaggctagaagaacataataaaacagtgtgaaggtattagccattcaataaatatctactgagcaccaactacatgccagcaacagtaataaactctagacaggggtgatcaaggcaaagtcctcataaagactgcagtttatatctgtgaaggcaaagtagaagagaaaaattacagttcagaggaatatatcttgtagtagggtcaggcagaaagtgctacgggaacacagagagatgacatccaattcaaggtggggcatccaggaagagcacatcagttaagtgatgtccaagctgatattacagaggttagttggaagagaatatgtggtgtgcacaagcccttgcaagtatgtagttgaaaatggcaggaaagtaacaaaagccagcttcagttggaactgtcgacttgctgtctatatagtgtcaaggaacttgggactttaaactgaaggctttaagtcacctatgttagaaagctccctcaaatggcagcagaaaagctgaagggaggaggcagagaccaaaagcaaacagatatttagaaagtagaaggggactgaatgcacatgtgaaaacgagggagagaagcaatgccagatctctggcaataaccagagagcagaaaaatcagggctctgtagctaactgacggagaaggcgatggcaccccactccagcactcctgcctggagaatcccatggacggaggagcctggtaggctgcagtccatggggtcgctaagagtcggacacgactgagcaacttcactttcacttttcactttcatgcactggagaaggaaatgacaacccactccagtgttcttgcctggagaatcccagggacggggagcctggtgggctgccgtctatggggtcgcacagtcggacacgactgaagcgacttagcagcagcatgactaactgatacagaagatgagagccttgggcggttggaaacaaaggttttagtttagcatacataaattggaagcaccttggtatgtgaaagtggaaaatgacatgcagggaaagacacggttaaatgaatgagaagataaaccacagattgggagaaaatgtttgcaaaagacatatctgataaaggagcaaaggaaaaggtgctccatatcatttgtcatcagggagatgcaaatttaaaacaaaaataagatactaccacacaccttttagaatggcaaaaaccaggacactgaaaacaccaaatgctagcaggcacttggttcaacaggaactctcattcattgctggtgggaatgcaaaatggtacagccacttgaaaggcagtctggcagtttactacaaaactaaacagggacttccctagtgttccagtggctaaaatgccgagctcccaatgcagggggcctgagttcgatccctggtcagagaattagatcccacaggctgcaactaagaattcgcacgctgtgactaaaaagatcccatgtggtgcaactaagacccagcatagacaaggaaactaaacatgttcgtatcatatccagcaaatcatgctccctggtatttatctacccaaaggagttgaaaatttatgtccatacaaaaacctgcacacagatgctgacagcagttttatttgtaattcctaagacatggcagcaactaagatgtcttctggtaggtgagtagataaataaactggtacactcagacaatggaataatactcagcgctaaaaaagaaccaagctatcaagctacaaaaagacatgaaggaaatttaaatgcacatgactagcagtcatgcatggagaaggaaatggcaacccactccagtgctcttgcctggagaatcccagggacagaagagcctggtaggctgccatctctggggtcgcacagagttggacacgactgaagctactcagcagcagcagtagcagcagtcaatgtgaaagacgtacatactgtatgattccaattatgtaacactctgtaaaggacaaaactatggacacagtaaaaacatcagtgcttgccagaggttaaggaagaaggagggatgaagaggttgacgacatagatttttagagcagtgaaactatttctgtgtgacactattaacggtgggtacatatcatttgtcaaaacttgtaaaacctaccaagagtgaaccataatgtaagccatagccttgagcaataaagtgtaggtacatcaactgtaacaaatgcatcgctgtagtggaagatgttgataagggaggaagttatgcatgagtagggcagagtatatgggaaatctctgaactttctgttcagttcttctgtgaacctaaaactgttctaaaaagaagtcattaaaaaaaaaaaacatagatatgagcaagagaatacatgggtctaggtttcacaagcaaagaaatctgagtgtcataagaatatattaatagaaatagtaggtcaggaaacaagtctgtactgagtgtcagccactgaggatataggaataaaagaccacaatccctgcccttttgcagtagaaactttagtaacactagccatggaaaaccaaatgactcaaaatgcattagaaaaatctttcttaaggatttttttagggaggaaaagtttatacctaggtttttctttaagggtgggtaggaagtctgaggttttcatatattgattttgtttgtagtgaggtctagagcaaaaataatcaaaacttaaaacattttataagatatatatggacatttcataattataactgaagtctgtaaaacagatctaagccacgaaaaacttcaatctctgaaaaccaagtaaatcaattccttcaaaatacaaagttgttgctctgcaaatttactgaactttgtttaccctccttatgtaagacctgttttctaaacactgtataagctgaaaataaaatcctattctccatattacgtaactgttaccatagctagatgtttcctttgtaacttcaattaatcgtagcctaacattcttttaaagtatagatattaaagtatattgttctacaacaattttgtaaaaatttcccaaagcttagaacacattacactaaattgaattaaatttctgaatttgtagcttgtgtaatatttatcctgaaaagttcctcatctatcatttaaattgtacttcagcttaaaatattattaaatgttcaattaagctgcaaaataaagaggggtcatgcaaagcaattctataacagagttaaagaaactattttggcaaagccaacttcagggttgcaactaattattccagatcacaaatgtctgttgtatattttaattcccagaacaaaaaaattacataatttgtacagtccatttgaggtcaaaatctacgtgtcatgaatttctaacagctaaccaaaatcctctcctccacaatttaagccagtatctcccaaaacaaaattaccagaccattacatttatcaccacactacactctgctcttcagtaatgtccaaacaagatggtgacaccatagacacctaacactcagaaattcactgtttcacttttctaagttaagacttcaaaaacaaactgacccatgaatttgattaaattctagatcacacaagacttacccagatgtcttactacagaaattttccaacgccatcatcttcaaaagcctggacatttatcatctaaacctcttgttttcatttttacgaactaacaaaatgcactaaaagaaaatctatgcagttccaacatatccaacataccaaaataatctcataaatctaacagccttggcagcaaacatttactgagcacttatcatgggcctgccactgctctaagccttaagcccttcacctactatcatcaattctcccaacaatcctacgaggtaggtactgttattacccctattttgcaactaatgaaaaagaggcagagagaggttaagtatcttgcccaaggtcacaaaccggtggggcaggactggaaccaaagcaggtagtctgacttcggagtccgcgctcccaacgttcaactgctgcaagagttaacaatttacctttgacagccccttatcaagaaatggtaaatgttcaacagctaaaaacgggcagtccgatccctgccctatatccgtgctcacggcttctacgactttgacaaatcggctgcaccatctgattttccgaacacacaaactggacttctctggatgtcagagcaaattctcaatctttccaggaacgggaaaagaaaaacctacgcaacactatggcccagattatccacattcctaaatgataaatctgggagagtccagaaaggcccccaaactacccgacaaacgaagcctacgaaaaccaacgtttacaataaaaagctggagcttccctggcaaatcgttcacgcgatctcctctctaacgacataaacaagggaggaggctgcattcttcccaccgcacaatgaaagcgcaggccggagcgggaaagaacgcagcgcaatcggggacgacagctcccggggtcgggggcaggcaggggaggccaaggacggctgagtcgccccgtcctgcccctgggccggtgcggggaggggccggagggaagagccggccactgcccgcactcagctgacctccgccatgttggccgcaaaccccgggaccctccacaacaaaggccggcacccgggcgcagggagcgccgggcgcctcccccggccaggcccgcctcccaggcgcgcgggggccgggccggtcggcgaggaggcccttccccgccctcgcccggccgcgaggggccgacccccggcgcgggcctgccgggccccgggagccgggggcgggggcgagccggctcgcctccgcgggcagggccgggcaggggaggggaggggcggggggcggcgctcggccgggcggccgggctcgggccgagacaaaggcgcccaggtccggggtctgcccgcacccccacccgggcggcgcgacccggcccggccgaccttcccgcccgccgccatgaccgggcctggaagtcctcctcccgcggagcccctcgcggccggctcctccctccaggccaggcccgacttacctgtgggcggagagcgcgcctcggaccccggtcctggctcaaacgcgctctgtcgccgccgtcaacccccgccaccgcgggcagcgccaccgccgcctcctcgtgccaacaccgacgggacactctgggccgccgctgccgttcgagagtgcgccccgcaacggccgccccggctcccccctggccgccgccgccgccgccgtttcgcgcgtcctcgagcccgccgcgcgctcccgctaaataccacacactgcggcggccgccatgaggaggcgcggccccgcgcgccggcggcccggagggggcggggcttccacgggcgcgcaggcgcagaggcgctcgcgcggccggcggcgactttcgcgggtcgaggtgctggctttcgagagtggcggttggcgcccgggttctgcgggcagttgctgtaactgaagacctcgcgaccaacaaacatcgcgctcatgcccgcaaccgtcccctcctggggaggagcagggcttcgctgccgcgtctgggacccggtttgcgcgcccccccgcggggctttgttccgcggcccaaggggtcgtcccgcgcggcggccccgctgtctacccacttgctgttttcacacagcgcctcctgcggctcttctcaactccgctctttcccaaaggaaaaagaaacgggctgccttagccaccgacctggacccccacccctaaagggaagaggtccaagccccttcctttagctttgagctgctcttcagc

SEQ ID NO: 244 - DNA, 86905 bp, Hippotragus leucophaeus
  source 1..86905: mol_type = genomic DNA
tttaggagacaaactgcagactgaatcaacaccagtgtgaaaacgcagctggtgggtgtgcgcacacacacaggtgaggtgcggtgttggcttccgcacacagtgaaggccagcaggttaccactggaaatcaggggacacaacttgaagaaatacaaccccagagcaaagagcaccaaatactgttgctgctaatcacactcagttgagtttactgggccaataggatacacggtctctgagctgccttattaagggtgacagtaaggataaaaatgctgagttgttaattcctttgcttaagccattctttattagaacccatcctttttgtaatcctgcacatcggtttgaaatattactaaaaacaaaaataatcgtgaagcattttcgatttttgacctttcattcccctagatgacttgtgagtagtttacatttgttaagttggattttctttcaggacagcaaagaaacaatctctacacagatctggttggagagaacatggtttaattaaaggcaaagctgatttcagcagctgcaggtcttgcacagacagaccaaaacaaataaacaaaaacaaaaagaaacacaaaagaaagtctgctacacagaaccagtttctgatgaagattctcctttccctcctcattactccacactgaggatgataaggcgaagaaccccgccccaagagtcaaaaaacattccaaacaccaaattctcatgcagaaatggggctgcagacaggacgtgggcactgcgggagcgggagcgagacggcgaacctggtgggcatgtcgagggtgcaagagttggtgacggttcaaacactggaatgttgcagctgcctgaatgcagagctcaaacacacaaagtgggtaaaggtagcagggaaggaggctcgggagggaggggatgggaggacggtggtcacggaggaggggctggagagaagcacaaagggtttcatattgccattgggtgggggacttcaccctttcagacctttccaaaaaaaaaaaaaaaaaaaaaccaacacaacatcaaaaacaaaaaaccccaaacaccatgtcaaactaaaagagcagtaatgtaagcattcgggactccaaccactctctcggaagagcaatgagcatgaatctctcaccccctttcattgctggggttgcccagactccagtgacgaccagggctcctggatgtgctttgctctgtagctgtattccagctcttgagtcccacgctagctccacacactcacacgcaccacccctcccctccagggagcagggccagcgtgcacacacacgaacattcacgcacgcaaaggagagccctcccagaaaacaaaccctaccactagcacagcaactggacatttagattgtttccataatttccccttaaaatattacttttccaggaaatgactatcagaaatgctgtccttctgtttctacacaagaaaactcttcagtcctctttccttctaataaatatcagataaaaagtttcttttcctttcttccgccttctccagagtggactccactgtgttttccttctgtgcctgatgcacaggcgtccgtgtcgccttggatttcctctgaaagtggaggctgggagaccacagccgggcaggggcctggccgctcagcgggccgtgcgcacgccgccacttccttccgtttcagactgtcttttgggccccaactgctggcccccatgctgttgcttcttggcgagatgttgtacacattaggaataaaaacaattacagcacacagcacagggtagaaagggggtggaggtagggactggaggaggtgggtggtaagtaggatgggggcacaaaaaccaaccaaacaaaaagtaaccacactgaaagcttctacctattaaactgtgtcaggccatgaatggactagcctgcctgctgtgggactgcctgcgacactaccgtaaaatggacaggagtcacaaacgttcctttagagccctacggcagtcctcggctagtccagcccagcaccagcagccatgcggcatcctcagctggggctcaagcacctacagagtgaagagcatttctggctggagtctccaggctagaggagggcccaccagaaccttctgagtccaagcggaggccgcatcctcgccctcatggaccgtttccacgggctgaagaggtcggtttccccatcctgtcaccaccgacctctcacaggagcagtgcacggggttttccttgctacacactgactagaagaagcacatctgtgtatggagaattcagtgtgatatcttactaccgagagtaataacagtaataaaagatggtcaggagtaatttcaactacattctcagtcagcaaagcaatcattaatggattcctattttattccccaaagaggaaaaaaaaaggactgagaagttcccattggcttctcccatctgccttcccttctcagctttcacttcccgtgtggctggggacatgcacgatggagacggtgagaggcggtgagatcaggtgactgagtgagacaaacagaagttcctctccccctccggaaggccccggggggacggagagttcctgatggttttttctttttgttgcactgcggacatttcgtgcacactcagcgggctggtggaatacttacaccctctcaacagcgagacacagaaaagagggctgccacctgcagggaactgtgtgggtcagtcctgcaaacccaacatgccatggtttatggagccttcattcccagggtgccgctctggcctcagtgtggaggattcatggcgccttgtccccgctgctgtttctgcttctgctgcattaacagctgctccaaagcggaaggtccaggatgcatcatggaactggaccagatagactgaaaaacagcccagagcttgtcagcagaggtcacatgcctggttgtctgaaagggatttgattttcaatcccagccaaacataaaggtgtgtatgtcccaagatctccaaaccctgaaaaaatccagctattacaaggagttgctgtaagaccaggtccttcaagactggttagttagttctcattaagatcattttaaaccagaaaaggtgaaagcatgttttctataaagtctttttactaaaattcagctccatgtgagaacagacactgactaacaaggttttaggcaggcaaaacatttatgaaattagatatccttcttttacttgttcagaaaaggagtaaagaaagtatttccagatgagtcagaattttcttaatcttagaatccaactaaaaccttcatgtctgtcccccagaggatactggtttatcactagtgaattcaaaaatttaaaaaaaaaaaaaaatccttttaaagaatcttataatgcagaccatgctttggagactttgccagatatatagtatgaatcaaacaatcctaagggccttaggaataaaacgagctatttatgtaaatgaatacagagacatctcatatggttcttgttcctgatccactcacctttaggctctccatgaggacagcagaggaatcctccatggatgggccatggcctgtccaggagccacttggagtgctggcctgatgccaactgctctcagaggatgatgctgctgagagataatcgatgccaaacccacccatggctagaaatgaagagaaaagaataattcaagaagatgttctttcactgtcaaaggtccaggaaggacacaaaataagttagttcacttctgctaagcaatgaagactggatctcacctggcttatcagttttccaccggtctgcagttctcctatccctgttatctggagtcccaatgggtccaaaattggagaatgggacagaattgtggttgtgtgttggaggggagcttggcaggctgcttgggttggaggaatgaggagactggctggctggtgttgaatgatctattgaataacagcaatgcaagacattaaatagaaacgtttcacaaacaacaagaatgaaagtttccggtagatttgatcatttaaattctcttaaaaataaccacagggtttcaggagaaaggcaaaataaaggcccccagagggaccctgccagatgtactagtctgtattactgtacatgtctaaggcactttccttaccttaaaaataaaaatgtggacagttttgtcaaacgtatgcattgttttggtgtgcctgtttcagataagtatatactggtcttctctatcagggcagaattgcctaaccttaagaattttcctgcaaagaatgaatatctacaaataaaactaaaaaacagctgcaaaccttaagataaaactcgtatttttctcccttacaactgtgctcattactgagaatgtaaaacagctttttttaatggcatttattatgtgaaccagctcaccaggcttttttacaccccattttccttcagaagttactttaaaaacaaatacaaacaacaacaaaaatcatagtaacagacaaaaaccaccaaatacataaaattaccaaaccacactatctttcaagtgtacgggtaataatgcaaagtctataatttaaagactagtcaatacctgaactggcaggaagagagggagaccatggagtcccttcaaaaagggagtacaatgatgtttcctggggagccactgagggattaagttctgctttggagctgggtgtcaggtttttcccgtatacctcattgaacacactgttatttgggtatcgttcctgaaagacagcgaccaccaagttaacagactcactccaatgaaagaaaatgtagtgttcatgcacatggatgcttgacagatcttaagactttctttgcaagacaaacttttgaaggcttttacttctgtttctttcagttttcctgtttttattcatttgctttttactttcccccaccctttatcctgttctatgtaaaccgctcaggttaaaagtatgaataatttacttggctgaacaagggagccccatttcaaacttataaaagtctccagtataccctaatcaaagcggggggaggggggagggggaaggggtaaaatcagatacctggaaaataccaatatatggaagagaaaggaaagagaaaaacagatgtattgagacacactgggaaagaaaatgctagcccacagcaggatgcctcactgtttacgcacctgattgagggagaatccggtgagagacaggaaagaggatgaatgtgacatgagctctgagggcttctccagtaaggatttcttcacagtcccagagggaaaacaaaagatagttaaattacgctttccattttcttagtaggaattttaagataccatacaagcaaaataaaggaccacaatttaagaacacctgtattcatctctcttgtacaaattaaagcttagaaagtatcaattcaactcggattactttttactaataccatggtcctgctaagggccagtcatcacaggtgagtcagacagaaccctcctgatcagtacttctaacttaagcacagagatcctggcagggaccctggaaactggcagtactgagtattcactaggtaagaacctcaggaatccctttgtcactagctgcatttaaaatgctctcaaaacaagacgctgaactgatcaaacactgttttcttcctaatttcttcccccctcgctagaatcttaaaaacacaggcattaatgactttaaaaaagcctttagatccatttgacaactggctttgttagcatggttcctaagcaactctatttgtggtatgtattcaaacacttgctaaagtcaagtttacatttattggtccttaagaactcattggtttaaaaaaaaaaaaaaagctgaatctctgatgctcactatcactgaactgttggtcaacaaagcatttattaaacacctgctatatgcaaggcactgtcacacacatgacatcattaatgatgttaaatataggaagggttatagttaaggtgttttttctttttttaacatgacaaaaccccactaaaagcaaccccccgacccccgcccctcctgtttcaccatgaggtttatttccaaaggagaaggtaagcacaacaagaattaacggattaggaaacaagtgaacagaaaggccctctgcccctaggcccttaagccacccagccaaaacaaaaacaaaacagcaagaaaggcaaacaggtagaatcaacagtttagaacgttttcttaccctgtgtttatggaaaagaatcagcaagaaagtggaactcaaaaatgttttacgctttattaagaagcagggaaggggaaaaaaaacctcatagcatacatctttcttgcagttcccgacctcagtaaaacatgtaaataatggcatcctttgaaatgcagactgggatatagaagattatttttaaaagatactactaatcaattcttagatcttatctctgtgctcactcattgatggtactccaatcgtgtttttaaatcgagtcctcttcatattacaaatctggctctgaatttagatcagggcttttagttaaccaaacagaaaagaaccacttactgtttagtaaaatcaatctagaatctttttattcagtaaaacacctggaacattatttcatttcatattttgaatacatgaggaaaaatctcactgttcctaagccagattaaatgacacctaaaattcccgggccaggtggaaatgacagctgaaaaggaagttaatttcccagcgttacatcttgtgtgtgtccagccctgcaggatgctttctggataacatatattacaaagctacaagatttgggcaaactatgggacgaagttttgccacattttactgtcacgtgaatgttagtttgggcaatcaggaaataagctttaaaattctgtttaaaaaaaggaaagccctagaaagaagaaactacctattctactagaaaatctcagaagaaaaggtaggggtcacagcaagaagaagaattacatcaaatacatacaaagaggcttcgtccaggaagagaggcgagaggccccagcagagctgggtaaagatcaggagggttagaaaaaatcagctcttcctcttcctccaaggcagccagactctttaacaggtccggaggaagcagaggggagcctttggggtcctagtgacagaaaggatcacagtgagatgcaataagggatgacaaaagcacagcggagtagcagcatcattagggagacgacggcagctaaagtcaaggaggaagctgtaaggagcagtaagacggcattacgcaaagaagaacaggcttcgaaacaccaaagcaaagtgacacaaggacaatgagaaggaaagatcaagacaacggaaagaagtaaagacagtgacagacagagcagaacataaaaggctaaggtggacagccagggaaacaatgcaagggagcagagagatcagtgttatcttgggctaacagagaaacagcttttttaaaaaaagttaccaacacacacctgtttctcatgagtgaaaagggcaaagaccgggaactccaccatcaaagatgacaggctaaatttgttcctctcagaaagccacttgcttaaatatgcactaaccctacttttaaacttagatgacccaccccaactgaaaggagctttgtctcagaattctctaatgtgctgccttaagagatttctgcacatggtcctctctgccagaccgtcaagttcaacgtcaggaatggtgttcttcagcttccccaaatctatgtggtgtgaagagggcaccaagagctgcgcccacttactcagtggtgttctgtagcactaacgagatcagagggacctttaaacatctacctgagacctctgaaatgcctagtgacagggaaggacacgcacctcaaatggcatcctgggcacagggtcctgctctggacggaagactcccggggaccgtttgcccctgcggtccacactggcttgctgtgccatcacagctctgttatcagcagcgctgtaggaagaatcccagtagaactccgggatcttgacttctgaggggttatggttatatggctccatggggaaaggcttcatcgttttctcaagaggctgctgctgccttacaggaggttgcaacgacggctcaaacagttttatggggtcttgggtttgaaggtagtagggctgtttcacaggcatgattttccctaatgggccttgaacctgagggggattccacagctgtttggaggcatctgcctgttgatactaaaaaaagagatgcctggttcaccaagatgaggataaaatgcaatgttacttcactcaggactcacagagagaacttgagagattttaccaccaacaaaactctgggtcacgcagggttgttgtttctttaggttttttaatacacagagctttttgagaacagattaagggcactgagttcatattctctttcacttccaatattaagaggtttaattcatgagggtttgagtgtgggtgggtgggcacgcatccattttcccttctgctccaagggctgcaggatgataatacttaagactggtgtcacagttctcttaacatctcatcaagagcacgattctgtttcccttctgtagttcaggtttaaatatgggaaattcttttcagaaaatccctttctataaagctgacaagcagtagcagcaaagtatggtaggtgctatctattctcctttacaaaagtaaaaagaacaactgaactttcctaaacagcaaagactgctgggttcccataagcattataagtctaagcaaaaagtagctgaatgcttactttttttttttttttaattggaggataactgcattacaatgttgtattgctttctgccatacaacaacctgaatcagccaggtatgcataaatcccctccctcccacatcccacccttgccccaccccgttccaccctccccaggttgagctcctgtgtcataaagcaacttcccattagctctctattttaccaagggaggtggattaactagtatttttaattaacttgacactgaatgatttcaggtgctcctctcctcacctcagctggaagtacacacaactgtaactcacctgttggaatccagagtggtgaggaggacttttccccaaagccggcacagcttttgtaggggactgctgctgctgagctagagcttgaacctgcagctggcttgcagtctgtgctgctggcggagcggggagaggtgggaggggctgctgggacggcggctgaggctgctggggtccctgggtcacgggccctggtccggagggccgctgctggctgtaagggatgtgggactgtttcccagcttgcacctggtttcctgctggagagtgagctgcaggctgaaggaaggttcctgggacagaaacaccagctgggaaggtgtaacctgagcccatagaaaatgccacaggaggggggataacatatgttgggggcgggaacccttcaaaatagaagaacatcgttttagttctaaggaaacttagcaaacgaaagacaaaaattagtcatttggggctggggtggagaagaggttttctaataaatcatgaaagacagggatcaaccatcaagtaagactcaagtgtcaacctttaacctgatttcaagaattaaatacaggttactgcctgctacttctatccactgaggcaactggaatgtcctaaaggtttctcagatgccatgtttagtgacaggcattccttcataataacaagcatgtacttgcacagaaactacaggtaaatggctcaaaaataactgaaaccattagggaaaagagaactaccttataccttctaatattaagggtttagtaatgtccttcagagtctagaatttctcagcaggtgaatagaaactcctacacagatggaattcagcagaagacattacaaaacatgtatttacctggccggctgggaagaggagggaaggctccagggtgatgaatggggatgaactgggagttacttgctggacttggggtttgagttacaggtgttttcctggcttcagacactggagtctttcttaactctgtctgagattttacctatgaccaaccagaagcaagactatctataataatctgaaactcaaatgagacagaaagcagcacctactctaacaaaggatttaaaaccctatgttaaaaaaaaagtaaagtacatgcttggtccactggagaagggaatggcaagccacttcagtattctcgccttgagaaccccatgaacagtatgaaaaggcaaaataataggatactgaatcaagaactccccagaattaggtgtccattatgctactggagatgagtggagcagtaactccagaaagaaagaagggatggaaccaaaacaaaaacaataccctgttgtgcatgtgactggtgatagaagcaaggtccgatgctgtaaagagcaatattgcataggaatctggaatgtcaggtccatgaatcaaggcaaattggaagtggtcaaacaagagatagcaagggtgaacgtcgacattctaggaatcagcgaactaaaatggactggaatgggtgaatttgactcagatgaccattatatctactactgcgggcaggaatccctcagaagaaatggagtggccatcatggtcaacaaaagagtccgaaatgcagtacttggatgcagtctcaaaaacaacagaatggtctccgttcgtttccaaggcaaaccattcaatatgacagttatccaagtctatgccccaaccagtaatgctgaagaagctgaagttgaactgttctatgaagacctacaagaccttttagcactaacacccaaaaaagatgtccttttcattataggggactggaatgcaaaagtaggaactcaagaaacacctggagtaacaggcaaatttggccttggaatgcagaatgaagcagggcaaaggctaatagagttttgccaagaaaatgcactgctcatagcaaacaccctcttccaacaacacaagagaagactctacacatgacatcaccagatggtcaacaccaaaatcagactgattatattctatgcagccaaagatggagaagctctatacagtcaacaaaaacaagaccaggagctgactgtggctcagatcatgaactccttactgccaaattcagactcaaattgaagaaagtagggacaaccgttagaccattttggtataacctaaatccaatcccttatgattatacagtggaagtgagaaatagatttaagggcctagatctgatagacagagtgcctgatgaactatggaatgaggttcgtgacattgtacaggagacagggatcaagaccatccccatggaaaagaaatgcaaaaaagcaaaatggctgtctggggaggccttacaaatagctgtgaaaagaagagaagcgaaaagcaaaggagaaaaggaaagatgtaagcatcggaatgcagagttccaaagaatagcaagaagagataagaaagccttcttcagcgatcaatgcaaagaaatagaagaaaacaacagaatgggaaagactagagatctcttcaagaaaattagagataccaagggaacatttcatgcaaagatgggctcgataaaggacagaaatggtctggacctaacagaagcagaagatattaagaagaggtggcaagaatacacagaagaactgtacaaaaaagatcttcacgacccagataatcacaatggtgtgatcactcatctagagccagacatcctggagtgtgaagtcaagtgggccttagaaagcatcactacgaacaaagctagtggaggtcatggaattccagttgagctatttcaaatcctgaaagatgatgctgtgaaagtgctgcactcaatatgccagcaaatttggaaaactcagcagtggcccacaggactggaaagggtctgttttcattccaatcccaaagaaaggcaatgccaaagaatgctcaaactaccacacaattgcactcatctcacatgctagtaaagtaatgctcaaaattgtccaagccaggctttaacaatatgtgaaccgtgaacttcctaatgttcaagctggttttagaaaaggcagaggaaccagagatcaaattgccaacatccactggatcatggaaaaagcaagagagttccagaaaaacatctctttctgctttattgactatgccaaagcctttgactgtgtagatcacaataaactgtggaaaattctgaaagagatgggaataccagaccacctgacctgcctcttgagaaatctgtatgcaggtcagcaagcaacagttagaactggacatggaacaacagactggttccaaataggaaaaggagtgtgtcaaagctgtatactgtcaccctgcttatttaacttatatgcagagtacatcatgagaaacgctggactggaagaaacacaagctggaatcaggattgctgggagaaatatcaatcacctcagatatgcagacaccaccacccttatggcagaaagtgaagaggaactataaagcctcttggtgaaagtgaaagaagagaggcaaaagttggcttaaagctcaacattcagaaaatgaagattatagcatccagttccatcacttcatgggaaatagatggggaaacactgtcagactttattttttttggctccaaaaatcactgcagatggtgactgcagccatgaaattaaaagacgcttactccttggaagaaaagttatgaccaacctagatagcatattcaaaagcagggacattactttgccgactatctgtctagtcaaggctatggtttttcctatggtcatgtatggatgtgagagttggactgtgaagaaggttgagcgccgaagaattgatgcttttgaactgtggtgttggagaagactcttgagagtccttggactgcaaggagattcaaccagtccattctggaggaaatcagccctgggatttctttggaaggaaagatgctaatggtgaaactccagtactttggccacctcatgtgaagagttgactcattggaaaagactctgatgctgggagggattgggggcaggagaaggggacgacagaggctggatggctggatggcatcactgactcgatggacgtgagtctgagtgaaatccgagagttggtgatggacagggaggcctggtgtgctgtgattcatggggtcgcaaagagtcggacacgactgaactgaactgaactgaactgacatgcttattcacctcacctaaattaaaaatgggaaaatcatattacttaaatacctcaaaaagctgtaagggcttagttttacttgtatagttattttgctttcaaaaatcacagaagtacgaaatatggacgaggactgagaactcatttcttttataaatgacacacccaatgccaaaagggtgaaacagttgcctattttcttaagccaatgttatcagccccagggccatgtattctctaattcattaagaacatacatgaattgataatgatcactagctcacagatgagacacttggccctcagtgtaacttcatctgggaggctttaaaggtatcattcaagcacccaccctccaccctgcaacgctaccacccccagaataaatgaggatactttcagcagtaaaaaatcaggcctgagatcctacacgtggcgctcgagaagcagatgccatatgcactgctcaagcaatataaagatgagcaaaatgaggaaaaccggcagcatttaatagaaaactcaggatgaggtacagagggtggtgacacactgattattgtcaggctttctttaatcacagatactcagatttaaaagggatgagagactggaagagacttcattttcttggacctttctgggaggcagcttcagagaatgaaggcagagcaggcaggaaacagctgaactcttcacccctaaaacactgatctctggctttatagttcttttggcatttgtcccttgcctttccccaacacctttcactctctctgtgcctttcctcaatttctaccatgtttttctctgtttctccccctactattaatattaaaatggaactattatgtcctttcccaaaaaaaaaccttgtaaggaaaatacactgtagatattttttatctgaaggcagctttcaaaaatgtaagaatcctcatgcctactgtaaataaatacattagccagaatgtgtttaatgaatcaaatggctacaaacattggtggtattaataagaccagcacagagtaaagacctttttctgtttatatgaaatcatctgtatctctttggtaagatacatacacacacatatatatataaacaagtcacaagtaactgagtagtgtttatctttccccagcaggagacttggattcttgctttacaaattcccatgagtcaggataacactgaggttacacaatgctactggctggggcagatggaaatgtcaaggaaaatctttttccaaaaatgtatttcattttgtagagtgaatctgggaaaaaagaaaacaaaacgaaacgaaacgaaataccactgtgtaagccttaacatactcagctatgtgggatatataaatatctcaaattttttaaaaatcgcagttatagctcccaaagaaaatgtaattatttgtgaaactgagagctctgcaactggtctcatttcctaccacttaaactggagagaactgacaaagatgtccaatcaggttaggattttttcactcatattacaatttctgtgaactgacaagagtatcgatctaccacagttcttcctattacctggctatgcagccttcttagcgtgcactgaagcttccgaaacagccacttcacaagggtttagtaacggaatggaactctcgccttttgagagcctcctctacctgctttctagctcaagcacagctcacctgcagtgccacactctgccttcctgtttcctgcaccttttctagggtgcctttcctggtttctgtttccctcttgttgtcatcctttccatcattcttagttacagttactcctttgctacagtccttctcacctctttgggaggaaaacttcttccttggtctctgttcgcttctcgtggcttaatgttctctttgaaggtgaccactggtttctctcctgtgtcacagctgttgcttagattccggcctgtagacagcactgatttcagtcctgggttcccgtcagctgccagggactctatgatggttgtgtcttgcagaatgaggttctctttggcttcactggggtcttccagtattaactctgggatttctgtgataaacaacaatttccctacctcattttcacactgaatcagcctaaaaagagtaaaaataaatccatatatgaaaaacataaatctaaaaaacagtaacaactgaactttgtatgggtcccacagccttaaaatgtgggaaacagcaggatgcaatagtgtggatttggggaacacaaacagtttccgcagaaactcacattctcattatgccaccacacatcaccacaacacacgcctagacccttttaacgtttttctagtaagtatagttacgtttgctcagcatgttttcagcacaaggcactagagtaggcccttgaagttcctattttctaggtgtgaaaactgaagctcagagatgccacaagcatcatcctggtctgtcttgactgaaactgaccaccatgcatgcccttttcaacacagatcaccataactgtgaacgtacaatttagttaagatttatacagacgtttataaattggagaagcatctcataataaataagggagacaaggccaattcctctaaaagaggcagtgtaatgagaggacagagattaaagaaattctaaagatcactagggtcataatctgatgctgtgttcccaaccttttgatttaagagtttataatcaatagctttatacccaagtgtaaaactcatatggggtatgtgtatgtatctgatgaggaataccttggctgattatctgcaatccatttgcctatagagatcaaacgctgctgtcgtatttgtcgttgctgaccctctttgtcgcctgtaataccctgatgacctttggaaaaatccaagttcctaaaattgacataagcaaattatagaaaattaaacctaatgaactgcaatggcttcagatttttccatacaggttagctatttgttgtaattagctccatttgcttgaacttatttatactcttaaagactgtaaataccacgaaacaaagcaatattaatgtgatatttttatttatatttcactttctcatggaggagttgaaataaatcacaaagttatattaggaatgacttttttttaaaaagaagaataaagtttttatttaacagtaagcttacatggtaagtaacttacttcaaacaaccatggcaatgctagagtctctgagatagctattctaacagatagtattatctattcacttcaaggtggtccaacctaaatcagaaaaaaattaacacataccataaagtgtacagagcaaaaaactcattgacattagaaaagtaagccaacctaaaaaataagggtttttcaaatttctctttaagccatcttaaaaaaaaaaaaaaaaaaaaaaagcagcagcatctaagaacttccaggcagtaggccagaaactgaggatacaaagataaatagtctcccgaccgtaaggaacaaataattatgatttaatccaaagagataaaagctaagcaaagaataagagaagcattataaaagaaacattactgtcttctgataagctttgaaaaggttcacaaaataagagatacctgacctggaccctggacaggtatggttaagagcttacagattagtaagggaaggatgaaaggaatgtgaatgtttcaggcacagcatgaacaaagttttggaggaataaaaatacagagttattcaagtacaggtaggtcacagtttatgtataacatgtgtaactactggagggggaagggggtgaaagtcgcaggaaatatggctgaaaaactaagcttttggacattgagataaaaaagatattttaacaacttgggatgtgtaaattgaagttttctgtactagtaatgggacattatcaaatctatactttattactgcagaagcagagtaaaaatggactaagtaaggagagaacttttaagtagggaagtacattaggaagcgtttttatactctaggtagacagcgacaaaggccacccacctgaaagaaggtctcaaagccaagaatccttgtaactcaaactcctctggaagtggtgttgctagagaagggcagaaatcaagacttgtaaacatttaaattaaaatattgttcagcaggatattggttcctatattaaaaaaagaatattttctagacagaaagaaagattaatgctcatagttctctgttcctctttatagttactgtgataaaataacttacctgtcaagcccctacctgtggcctctgagcccgtgacattgccctcatactcacctacaactcaaggctgaggaggatgtgtacgatggactattttttccccagcagccttaaaaattcacagctcgatccattaatcacaatgtttagattatctccttgttaactcaaagcactgaatatcaacaccacatcacccaggagcttgtaagaaatacagaatcttgggcattatcccaaacctacggaatcataaactgcattttaacaagatcccaagtgattcatttgcaaatatgatgcttgaggggcactgatccaatggaagaaaactaatcagaaaggagtcaatcaactacagtttgttcagtgcagtgctacttataatggggcaaagttttaagcaaatggataatcattaaataaattatggcatagccataggatggaatattaagcagcctttaaaaaatcatgtttcaaaatgtttaaatgacaaagaaaaattctaacagtatcttgttaaatttataaagcaggtgtgtgtgtgtggggggggcgcttagttgtgtacaactccccatggactgtagcccgccaggctcctctgtccatggaattctccaggcaagaatattggggtgggttgccatttccttctccaggggatcttccagacccagggatcaaacccaggtctcctgtattgcaggcagattcttaaccctctgagctatagggaagtccaagctgtaactatatcacataactttaacgatgtgatatcaatcacatgcagatatgtgtatatacaaagaagtaaaagcctcaaagaaaacagagtatcgtgaatagtacagagaatatttctgtatgagagaactaagggggacttgtgttgtatgtcccaaacgtcctgatgagcaagtattattgtgacaagagtaatgttgttcacattagttccccaaaaaaataactagtaagaatgaggaagaagggaagatggaaagaatctgaaaacactactgtctggactcctattcaaatgaagcagaacaggagaataagctgagagaactacaagaggattattacctctatttccacccacttaaccaatgcaaagcacaaagtctcctctgagatactgaatttaaagtcaaacacttaagaacaaaaccttgtttttctctggccttaagcccactatttacttcctttgtggctcagctggtaaagaatccgcctgcaatgtgggagacctcggttcaatctctgggttggaaagattccctggagaagggaaaaggctacccactccaatactctggcctggagaattccatgtactgcatagtccacagggtcgcaaacagtcggacacactgagcgactttcactttcactaagcccactgtcagtgatggagaacaatgtcagcaacacaaggttgagggagcccttaccattagtacttgaaagatcttcttcatggggatggaaactgttcagaagagaaattagccatggccaaatgctgtaaattaaacagatagttcagactttatttttgcatgagaaaccagaacgctaataagccataaaaatgttaccaacaggacctagactatgtatttttctcttggtttagcattttaaatgctgtatgatttcctaaaatgtaattacaaatgtgtctagataagatacaccagaagggccaaacttccgtaacagagacctactactgcagatcagtccccagcttcctaatttaacaatcagaaaactgacttgtcagttttattcattgaaaatggatatttactgagaaacctttgaccagagaaacagcgcattatgtttttatatttttcacatacattatcagttatggaacccattactagttcttaatctgtgacatgggatgtggttacatcacagtcaaatcacattgaaagtgatgaatatgcctttttctttatgatataaaaaaattcacacattgttacaatgtccttaccctctgtctcctaacaccaaacctttgccaaagtttgcaaaatattaaaaacatattaatacttagttaaaatattaaaaataattacaatctacttaagataatattaagattttctagaaatatgtagccacaaatgttggtaaaaaagtgtggctttaaaaaatttttaaaagcccagggtgagttgcccaggatagagagactagatgcacacatcatcacatcagagaaaaaacctggaagctgacagctgtacactttaaaatataggaatatgctactttaaaatatatataaatgaataatataggaaaaaagtataaagaaacaacattgaagaataaatgtctgctacaagcttttgaggatgtaatgaattaagagacagttgaaaaggaagaatgctagactagaacaatgtctctacgcaacaaatatgagatctcaagaaacagacaaaaaaaagagtataagaaatgacttaatgatatacactgctttacccccactgtgggttacttgcctaactctgctttctacaaagaaaaaaaaacatcactatttcatgtacttatcagtttaggagaacatgttctcaaaaaagtatagaagaaaacaagttctagaaattataatggtcaaaagcaaggaactgaaggttacttgaagtttagaaatttgttttttccctcatttaaaagatatgaggattattacacattgatgtatcagacacattatgaaaatcttcagttttagagaattaccccaaactagctgaaaatgagtaacaacatactttaagataaaataaaatacctgcaaggacataattctaaagatcccaataaatctgtcagaaggaagggagaataataaatcatatggaagaaaaaggaaagaagtttgaaaataaagctacttcttctggttgaatatccttggcaatggtaagaatgcacagggagttccctggcagcccagtggttaggacttggggctgttgcagctgtgacccagcttcaatcactggtgggggaactaagatcctgcaacttatgtggcacagagaaaataaaatttaaaaaaaaaagaaagaaatgggaacgcacagaatgggcctaaaagatcactcactgtacaggaacaaaaaaaaaacctaaataaaaatatcaatgctttttccataacattactaatacaacttagtgaaccaaacacaagttctaaagtacacacgagaaggaaaaaggtatagcttctggttaagaaatgaaaactctgtgcaagaaaacactctctataacttactaatagctatcttggcatgaaaaagagaagtgtagtatgctgtgcttatgttgctaaactccattcatgacaatatcaaacatgaaggcacttaaagttagatttgacgggagaagaggtaagacgagcacaaaataagagggatcatggggtcctgaatgtggctaggacacttttcaggttgtgactttggtcaatatgcagatgctgagccacaaattagaaatttcagagactctcccaatatccatcatcaaagtatgcaggagagaagcttctcactcactgcaaagccttactggaagtatttattctattgtttaggggctaagtcgtgtccgactctttagtgaacccatggactgtaacctgccaggctcctctgacaatgggattttccaggcaagaatactggagtgggttgttatttccttctctagggaacctttctgaccagggattgaaactgtggctcctgaattgtcagatgaattctttactgatgagccaccagggaagcccatttattcctatggccaaaggtaaactgaaagctttcatttgtcactgtctaatgaattcctaagaactgtcaggaatattctgagtagagattacacagaaaatcatgaaagcccaaataatatccaatcctcagaaaatcatgaaagcccaaataatatccaatcctctatgcttagaacaaatataactcaaactgggtgttactgaaagtcaacatcaaacagcttagttaaaaaaaagaatggaagaagtaaaaaatctcttcccttcaattcctaaacagaaaattggggtgtatagtaatgaataagaaacaaacaaacaatttcattttgcaatgtgaaaaatgccttttccccaggatggcaaccaggaatgcgggagcacacagcaagtcataaatccttaagactgtgcctcccatgaagaattcaaacaagtaagtgaaaagcatacaaagaagtcttcagttcaatttctagagagtaggtggaaaatacaagtcctccactgttccaatattgtgttagacggcagtttctacatatctatggatatcaaacaaagcacacagctaatgtgaaattccgagatacttactactgtctttcatccaccactgcctcctgaaacaccctgggtctgagtctcagccagtccatggacaccttgacggcaggtaggggataggcattgtaggattcctcctgagacttgttctggagaggacacttgcacaggatgccaagaaaagacacttgaagaaaaaatgtgcgcacaaagcataagatatttgaaattgtgtaccagtccaaattaaaatattactacaagccttgggctgtatgctacttaacacttaaaatatcttacagcctctttctaaaaagacattttcttttcttagaaatgtcacagatacagttgataagggggatgttagcagctaaaaggaaagaacttagggtttaggcctcttaattcagtattacaaaataaacactttttcatgttactaatggtttgttgcaatgatgaaaatgtcaaagttcatgcttcccaaaaaagatggcacaggaagttaaatgatttaatactcactaaagagggccagcaactgtgtccaacacagctgctcatcttggctataactatgctgctccgtttcgttgctaaagtcacgaaggtgatgaagttgaaacaggttaatgacagtgacgtgaactaactgctgagagttgaaagctttctggaatagcagcctctgtaaaagaagataggaatactgaatatattatcaagaactgaagctgtcttcagcacaagaattaaactggcagtctgcatttaaaccacaagggtaacatttatagatgagtattttaattgaatatgatgtggtctgatgtttctcatgttgaccttctgccttgaaaagatttaacccagtcaccacagagctgggtttttttttttttaacaatactttttaccgcaagaaactatatattttttaatatgatctgagaaaagctttttagaggactattaataaatttatacattttaattccttagaagctgttttacgagagatggaaacgtactaaaatatgaaaccaggaccaatgatgacaaaataggtgcacatagtgaaaatcaaaatttcaagtaaaaagaggcaaaacacatgtttttgaactcttggcatgtaacaaatgtcttccaaacttggtcataaagtttactctttcaaaggcttgacacatttaaagaaatttatttataaatgagatatatagcaaaaacatatctgaaacatagggtaaatgataaaccaaagcagtcattaacaagtattataggccacctaatgcaaggagctgactcatttgaaaagaccctgatgttgggaaagattgagggcaggagaaggggacgacagaggatgagatggctggatggcatcaccgactcaatggacatgaatttcggtggactccaggggctggtgatggacagggaggcctggcatgctgcggttcatggggtcacaaagagttggacacgactgagcgactgaactgaactgaacaggcatttgtacaaataattatactgacacgttcctctatcagaaaagcaatggccttcacgaccacatttcttttacttaagaacggtgtgttcacagtgacctgctgagcatccctgtgaggaaagcttcacctgcacactctcagctgccttaatttcatcactcttctacctcaatatctgcagtagttcagagtactcccatagaaaacagttttccaacacaagttcctaacaaacttgatagctgttagagatgacatcctggtttcaccttacacttcagccacggccaaatatcctccctccccaggcaaaacttttggagaaagtggggttcactgtcactagccttatgatgggaaatggattatgtcacttacacttctaccagcagtgataagagatcccaccatctcagaaatttatagctgctggtgtccagcctattctgagattttattttttacataaagaatgtgaaacatccagaataagttccataattctactaacaagatctttcacattatcattggaaaaaacacagttctgtttctcttcaactctattctccctatcatcctgccatctgtccttccagtatatacatcaagaatgcttactcctttttgaatggcatcgaccatttttctttcctttactctgaatgtcctgaaatgctatttcttttccaagtgctcccataaaactcttctttcattctctacatccaactttacagatcagctatttcacacaaacacataagattggcatgagaatattttttcaagaagtgtgcttttctatgagtataatgtatagtaatgtatcccttgtatctataaatccagtggcctttattttagaaggcaatgttctactcaacaaattaaaaaaatttttttctagtttatgtacagaaacatagcatatgagagcagccaaggactagcaaatgataatggaagttcatcaaggtacagactgtgtcttgttctcccctatatctctaagagcttagagaagtgagagaagtgcagagtatacaatacgaactcaaacacttagtgaaggaataacccatacttttaggaatatataactattaagctgtaattgcataacatgtggattgcattttagtaacagattaaaccaagactgactttttgttactcaaagatgctttcaacagcagttaaggattatactgaactaaatactgttaggaaacagcattaacagatataaaagcattgtatctcaattcctaaacccagatcttaagtcctctaatgaggacttaaggacttcaagttggtacatgtttctgcttagtagataaagacttgctggtaagacagatacactgaggtttacatgtggataatactaattatctgtaaaggctttagaaatacttactcaactatgctaaaatttcacttcaacaatgttcttctgacatttcaatactggctaaggtttaaaatagatctgcctcatactatgtttaacttcagagtgttggaataatactttaaagtgttattttagcaattgcccatatacacccaccagaacttcacaagcaaaaatatatatctgcagacaatattagtgtctaaggttgaaccaaatacaaaattgactagattctatacgagaatgacttagagaagatcttatgaaggtaggtcccccctccctccccatttagggagtatatcttgaatagaaccagagctggaagcaatctcaaaagatcatttggtccaaccccctgctattcaatgagactgcacctaaaccattcaagaaaaatggctgtcaatttgacttttaagctctcaaaagagaaacctcttagtaaccccgtacaagtctctatttgaattttatgattttacttctgacttcaggaagacaaagatgtgttctttttaaaataatccttcatgtatctgaaaacttacaatgaataatatttagacttgttttttctcggctgaacagcctagggctttaaaaagttggttgtttctttcatgtacccaaccccataaatcatgagctaagtttaaataggtcactaacagaagcagagaacagcaggggactctagaagcttattttaaaaacaagctatttctattatagttatttggtataatctcttacacataaaaagtatcaactaaaaaatgatcatctataaaaactatttctgattgtatctggctaatttactgtctcttaactacaatctctggaatgtgaaacctgtgtaatacttcatagacaatttcccagttacagacaattccccaggtgcacagacactcaaaagtaacctagaaatatgttatttgagactgtcttgttcactattgatttcagtgactaaaacagtgattgatacatactagtcaaatgtttgttgaataaatgaactaaaaataatacagttaattttaactcctccaatattatatatattttactacatcatttaaacaaagttaatatactaataaaaattattttcatacatttaactagaaaaaaggttccttaattttatctccttgtacaaatgagtgaaatatatgcctgctgaatgaaattctcattactttccttcagtcaatcacaaatcctgagggatcaaagcacagtaagaacaatgagctcagtttgcagaatggaattactctcaataaagtaggcaaccaaatcacatctaaatacagaaaacatcaaatgctggacttccaaaactgagaaaagaaagctgcttgatctgagagggaaggaggaaaatttgtcttttcccactatgatattttctgccaaatggcagctacttagtgaaaacatgtctgctgtgtttctttatatagatagcacctcagtttaaactgaaggaatatggtttgccagaatttcacatgctttaaatttcagttttatcagcatttcataattaagtaatgacataaaactgggagtaagtctcctctaaaatcgtatgcttcatcatttagaccagaaaaaaattctgtttaaaaaaatctaaccttaaactgttcttccaacttctctcgaagagggctcaacttttccaagctcttactcaggtacacatgaccatggaatttaataaaggccttgatgaagtcagaaacaccccatttggttttcacctcatcccggctgaaatgaaagaaaaactttcatgaatcttaagcagcaaaatggctaaaacgtcttacaggagactttgatttgcaaaaacacattatttgagcacctgtgcctcagggagcagactgtgctctcaatgacttttcaactgtaacatgctcagatgaattagtactcagcagcctgtactactccactgggaacaactcaagagactgaccggttgaaattcagtggcgactacaatgcaaaactgttgtaatacatatgtttagattttaggcaaataggagagacaggaagcatgagcaactggccattatttcttgtatgcccaaatttgagtccatttggaaaagtcaaccctacctttccagtgctttagaaagtgctttttgtagattagtagaggcagctgggaaagggaacttcacagcaatgcttctgcagtagtagaaaattgtagtcagatggtctcctttggaagaagctaagatagccaactgattgtaaggctgacctagaagagaaaggtaagattctaaagtaatccaagatgtgtgaagtcttgctatcacagaatgcagaaggtcagtttttaaatctctgtattaacaatggggagcattttataaagtaaatctcatgactagctcattaaaaatggcctagtagcacactttggtgatggcggataggttaaaaagtcctatgattagggtggagggcactctaagttcaaataagactttggaaagggctagacagtaagtattttttgctttgtgggccagtctctatcacagctactcacctctgccaccgtagtgggaaagtagccacagacagcatgaaaaggactttcaatgtggcttaacaagaatgcgtatcaccaaacacctaaagtaatttaatttaagaatcactcctaacgcccattcagggagccatcaaaagacaaaagcattatctttttgtagtaagagagaatttttctaggagggaaattatggtattaaaattattattattattagggaagccagttgttgaagcaattttagatcacattagaggatattctattcatagtgctttactgacaacagtaatatttttatttccaattacacagaatgtacagttaaaaggaaaaatacaataatcaataccaaaacagaaaatatcttttggcttcttaaaggagccctgaactatctattttccatttttctactgagagaaaagtgtcataagcaactcaccattggaggggacaagctgagccgcatgcctatagtaggactccgcctggctggtctggtttctgtatcgagctaagaggaaggaaagaaaaagctcagcttaaaaacacacatacagataaaaacaaccacattagggtaattccaaaacagttacagtttaaagatttaaagttaataaatacattaaaattaaattaaggtgattaaagacaaaatattttaaaacaaattaactataggattacgtgtgaagtgtccatccagccttccctacctgggacattcagcatgtgaccaactttaaagcttacctaggccccattttcaggtcctccagtgtcatgccatcaccagctcccactacggactatgctggtgacctggggccggcccacaagaaggggtgagttatatggcacttaaaaacaaaacaaaacaaaaaacactatacaatatgatctgaaatttatgtatttctttaatatctttataaagtgattttgaaaaatgcctcagacctattgaaatattatttatgtgtgtgcaaagaatacactgaaagcaaaagcaatctagatatactactactcgctgaatctccctgtagaaattggtgcttactttgatgtgacctctcccggaatgaatgacatcaagaaatctaaaaatctctgaatgtaaatccactccttgttatttgaggacagtcaaaacataatcctatagttaatttgtttcacaaccctttttaggtcaccttaaaggaatgaacaagaatatatatattatgtaacattcccagataaaatatataaaatggaaatacaaactgaactgtaaaaagcaaacaattaaaaatgaacttttaatgcactggtaggaagaaaagaaggcaacccagcttcaggaggagtaatttttataaactccacaattccaaagaagtagtctttcagaaaatactgtggcatcactttgaaaaattaagctttgattacatttttgctggtttattatttgcctacatctgcataaaatctgaatatgaaagttacttcctttaagatcctttgccaatctcaaagcattcagaaaatcaaagtttcttaaaatacattttatagttttctctcatgacaatctaagttgtatgtgtatgcttgtttaaaagaaaataatctttctatgactactccaaagaaaagcatgaatgtattatcaattccttcacaccaagggctcaccaatgtctccaaggtgaacgaggcagtgctggcagatataggaacaggagctagactgtggcttcactatggcgctggtatgcgtctgtttattgctgataattcccaactgggaagacttcacacggcatggtaaatctacattaaacactgtacacagttcttgtaataactgaaaggaaaacgtgagcaaggattagtatttaagtcagagtgctctaacagtaatgttggtatacttcaacatgtgtaatattacatactgctaagacctaagataggacaacctttcataggataactagtaacattcattacaaatcatatcatttcacttgccaagtattagagcaatccaagatgtacatctaaaaggaactgcagcaatttagggaaaaaaaaagattttacctaagtaggctattcagattcattcagcaagcaactccatgaaattacctctctctctatatattttgttttcctcttagaaacacacaaaactcattaaagactagttggttacaaacttgacttaaatacaaaccaacatatttggcagacttcaggagtttcttgagatttattttcttaagctcgaggtcaaacttgggtctctgcatacacagatctacacatctgtagagatctggaaggaacttttgacattatatagacatccactctttcttcctttcttctctagttttatggtatgagagggttccttctctcactgagaaataacttctctgtctgagcatgctgtttcattcttttctgccttctgcctgtcatcctctcatttttaaaatctacttttaacttatcaaccttctttgctatggcctatgaaatgtagcccacaaaaaataaacaataattattactataaaacaaaacacagagaacggaagcactttcccttgactctagatttctcctttagcaagcttttaatgtcgcttcttcttctcaacagaattccttcaaaggagtccacaagtatcacatctgctttctcaatccctagtcgctccttggtccattatgatctgactttcacacaacctctctgctccccatcccaccatccacaaccactctactgaaactgctgtcaacgacttcttgttaaaaataagcaaatacaatggatgtttcctagccatcatcctagtggatctctctgtcacattgaaaacagttgattttatgactgatcactaagcttttctagttctttttttcttgcccattatttattttcagtgtccttcattcaaaagacttttctccctccacattaatagcctcaagcgcttaattcttggccctccacacagctcttcacattctactctcagtcattcaaatatttacttacaagcagatgacaccacccttatggcagaaagtgaagaagaactaaagagcctcttgatgaaagtgaaagtggagagagaaaaagttggcttaaagctcaacattcagaaaacgaagatcatggtaaccggtcccatcacttcatgggaaatagatggggaaacagtggaaacagtggctaactttgtttttctgggctccaaaatcactgcagatggtgattacagccatgaaattaagacgcttactccttggaaggaaagttatgaccaacctagacagcatattcaaaagcagagacattactttgccaacaaaggtccgtctagtcaaggctatggtttttccagtggtcatgtatggatgtgagagttggaccataaagaaagctgagtgccgaagaattgatgcttttgaactgtggtgttggagaagattcttgagagtcccttggactacaaggagatccaaccagtccatcctaaaggagatcagtcctgggtgttcattggagggactgatgttgaagctgaaacgccaatactttggccacctcatgcgaagagctgactcattggaaaagaccctgatgttgggaaagattgagagcaggaggagaaggggacaacagaggatgagatggtttgatggcatcaccgactcgatggacatgggtttgggtggattctgggagttggtgatggacagggaggcctggtatgctgcagttcatggggttgcaaagagtcggacacgactgagtgactgaactgaactgataatcattcaaatacttggttattgtatcacacacccgtggaaaatagggacacagagataaataaaaaaatctgtgcttaaggagctcacagctaaatgagcaagacaggtacataaagtagggaagggagagtaggagagacgaggaagagagagaaagatatcaaacacgatagcataaaccaacggaatattctatgcctataataagtttcaatccctgggctacgtgtttgtctcacttaatccttgtgataaactagtagcaatgcaatatgttgcttcaacacaggtatgaagctccatttttttcagatgagggtatgaaagcaacaaaaatattgagttatattacagaattagaaatatcttgattcaaataccactctatctaataagtacagatttcacgaaacaaaataagataccttgggggacccaactcagaatgatatataatatctcacccttttcctaagataaaaagcacctctataaccaaatataaaatcctatattcccttctcacgaaacacaggggttgtctacaacggtacttatacctgtacatttgcaatgtgcaagaaatttactgacataaaattgagcaaacaaaactagtgcccagaatgaagagagtctgaaaatagaaaaaaaggaacaaaaaatgggaaaaaccctaaaacagattctgtggaagacagcaagaagaaacatgacagaggataaacaaacaactgaaagagcagactggaaaattaggcacagttgaatatctatagaagaaaaaaaggatgtttaagaaaagtaaatcaagtatggttcaaacttcatgtggctgtcttataaaatttttgcctgaacccaggagttgtaggtagagatactgggaaaactcctgctggttcaaaggattccaggtgagaaagcacgagctgaggcagaagcaaggtgagactaaagagcaacagatgtgtaataagctgaacaaaactatatttggcaattattctgtgaaaactctattatactattccactgctccttagctcttcaatctaccctaagaatttagaactaaatatgaatacacaaggattccctcatagctcagttggtaaagaatccgcctgcaatgcaggagaccccggtcgattcctggctcgggaagatcccctggagaagggataggctacccactccagtattcttgggcttcccttgtggctcagctggtaaagaatccacctgcaatgtgggagacctgggtttgtcccctggagaagggaaaggctaccacattccactattctggcctggagaattctatggactgtatagtccatggggtcacaaagagttggacacaactgagcgactttcacttttcactttcactatgaatacacagaatatcttattaactactacagatacttaatgctttctttttggctcccatttcttaagagtaaggactactctactgttctgttttttcatgttttaaaaaaacccatacggcatactgttacatctttacttcatttggcaatttggttctggtttgaagcaccatgctttaataccaatagttaacaaaacgatatctaagtcaaaatcatcttcacagaaaacagaaatgaggataatcatgttatcagtctctttccaatccattgtaatcagatttctatctcaaccactcaatttaagtcaaattttgtcaaatccaagataccaaaaactataagatgaactattatttatgtaacagaataaaaaactgccaattaaatggtgaactgaccatcttttgtaaatgtatccctatctcagaggtgttaaaatatgaaaaatgttttagaaatgaggaaatacggtatccattaatttcactaatgacttctgtgtgtcaaatccaactgatcctttttaatcaccttacttgatatctttgtagcactcaactgagttggtcactccctcctcatagcgaaatgcttttctcttcgtcttctaagataccactctgatttactcctactgaaatgtggctcctcctgtgccaaacctgttcctacctagttctatggttttaaatgcaaaaccctaatgtctaagtcagggtactttattgtaatcataaattttattctggctccaaccttttcactgagctcctagcttagcttatcaaattacctatttgacctctccacttatatgtcaaactggcatctatctccctagtgtagcatgaatacagttgtcttttcctcagtgttccctatctcagtaaatggtacaaccagtcaactagccactcaatctgataacttaagttacctctgactcttcccctatcctgattccatacatctgatccaatccattaggaagtcctggccatactttaaaaatccatccatatctccccatcaccacagcagcacaccatctgccttcccttcctgacccctgctacatcaatctccaggcaacatccaaagtaatctttcaaaaatacaaattttatcatgctattcccctgtctacttcccaatgacttgcaactatacttcagattaaaattcaaaactcacctgagtctataaagctgtacaatgatttggacctggtgtacttccccagtctagtagcttaatctgtaccacatgtcatcaaaaaagatgtacagaacattattgtttacaacaccaattaactgtttcaattatcaagtcaagataaccaaaaaaaatgttactaacaagttctattaatgttgagatctgaagaaagtttactgctgctcattctatgactggtgtaattactcgaccagggcctgtggaatgcagtgggggcaagagcaatacttactacaaaaacttcaaaaaacaaatttcaaaattagattatttatatattttcctttataaaatactttcctttataaaacaatattttgagacatttaatgattttattattgacttgcttataaaatgtctttgcaaataacctgctacctcaacaaaaatgattcctgctatacttccttgcagattcatttggatttatcagtatccaatcgaacccttggaaatgtgctccatgtgcgtcacatcataaaaaaaaaggttaagaatcatttttcaagatagtctatgtaatggctaatataaacatgtactgcagaaggtggatactctattgggttggccaaaaggttcattctggtctttctataagatcttttggccaatccaatacctccaccaagtctctactgctcctcccgacttcagctgtgttcacagtttagatttccactacatggaggagatgtaggtttgtaggagatttaggttggagatgagactggagttttaaaactagactgtttattataaaaacctaagagcaatgagaatggtacaaaatctgcccaaaaggttatgatgggaatctggaattgaaagaaatatagttgaaagtagtaactggggggtgtgttatgctaggaatagggagacataccatttttgttaataccccattgagctgagactattcaactaacgtttagagtccaactgtatacataattttatatcatgatttttcatttaacacaatttcctgatcataaaaaaaaatcttcataaacaggacctgctgctgctgctgctaagtcgcttcagtcatgtccaactctgtgcaaccccatagacagcagcccaccaggctcccccgtccctgggattctccaggcaagaacactggagtgggctgccatttccttctccaataaacaggaactaattaaacttaaaagcttttgcagagcaaagaaaactgttaacaaaatgaaaacaccacctaccaaatgagagaaaactgataaggggttaatatccaaaatatataaactgcttatgaaacttaagatcaaaaaaacaaacaactggattaaaaaatgccagaagatctgaataaacactttttcagtgaagacataccgatggccaataggcaatgaaaagaggctcaacattgctagtcatcagaaaaatgcaaattaaaaccacaatgagttattacctcacaactgtcacggctatcatcaaaaagatcaccaataacaaatgctgatgaagacgtggagaaaagggagcccccatacactgctggtggaaatgtaagttggtacagtcagtgcagaaaacagtatggcggtttatcagaaaaataaaacagaactaccctattacctagcaattccactcctactcctgggcatataaccgaataaaacaaaaacaaaacatacatgcacttcaatgttcacagcagcattatatacaactgccaagatatggagacaacccaattgtccctcaacagatgaacggataaaaaagatgtggggagtgtgtgtatccccacaaacatacatgtacaatgggatacgactaagccataaaaaagaatgaaaatttgccacctgcaacaacatggacttggaagagattatattaaatgcaatgtcagatacagaaaggtaagtgcctgtacgctatcatttacatgtggaatctaaaaaacccaacaaagtagtaaatataacaaaaaaatgaaatagacgcacagataaagaaaacaaactaatggttaccagctaggaaaggcaaaggaaagtggagaggtagaggtaggggatgaagaggcacaaactgttatgtgccaaataaataagctataaggacacattatatagcacagggactataaaccaatattcataattagtataaacagagtaagtgtttcccagatggcactagtggtaaagaacctgcttgctaatgcagaagacatcagacaggcaggtaggtttgatccttaggtcgggaagatcccttggaggagggcacggcaacccactccagtattcttgcctggagaattccatggacagaggagactggtgggctacagtccatagggcgaaagagagtcagacatgactgaagtgacttagcaagcacacaggcataaacagagtacaacctttaaaaattgtgactcactatgttgtatacctgaaacttacataatattgtacaccagataaacctcaattaaaaaaaccttcataaataccatttataatagtttcataattccattttacagatggtttataatttatttaaccattactctattgtaggatattggtgttgcttccaaattttagtatttgaatataaaacctatttgttcctttaaattgtaattattaagtatctgttgatctatggacaaacgcacaaagaaaaacctgtactgtaagaacaaaaactatgtaacttctgtatttcgaaaaacttcaaacaaactgaaaggacaagaaattggagaaaaggatgtgtgtcaaaaaaaaaaaaaaacaagggaagaaaaattaatatccctgtgcagaaagagctcacataaattactatggaaaaaactagagtttgaacaatggatggggaaaataaatgattaaactgactgtataaaatacaaatatctaataaagaatgaaagaagttcaacatcagtagtaactagacattaaattattctccatctatgaagtatcttatcaattaatcattcatttgcctttactgaaatacttaatgctgttgagtgtgtgtcaagatagacacttgcatacactgttgatggaaatttaaaaacataaaatgataactttctgggaaaacaaaagtgattatcaatagtgttaaaaactgtactcatcagtaatttatcctgaatgagagggtaaggaaaaatgctttgactttttataattttcaaatctcttggcattggtatgcattttttataatggaaaagccaaaaaaaagtatctattaatatatccatctcctcatttagactggatagtcctttgaaagttaaaagatggtctctcttccctctaatcctctgtgtctagtattgtgtcttacaaagaacagatttttaacagttacttgcagaatgaattaacctttaacatctaccctaaggattagtcaagtcaaaccataacccctctccccagaaataccaacttttgctaaaagctggaagcaattaaaaaatgaagtgtgagaacaagaaccatacttgagttctttcaatgatgaacagtgatgaattttttagtctaagtaaatctataagatggcagctatttgatatctttcaacagtcttttctaaacagcaaaaccaaaacagacaacatataggtgcagtggtcaagcagcagcacagaaagaaggttctgtgaatttctttggtgcaagctcctcaaaatgttgccttgtcattgtaagatgagaatttatacacattttattaaattatgaatgctattataagtgaatgggatgaagttttcaaaggagttctgcttaaataaaattcattgtccaaaaagaattatttgtctgtccaaaaaagaatcattctacctcacgtgatttagaagtcatatcgagatataactaaggttagggaaagtttctgagaacagtaaataacagcttattattcaaactgagcaaaggctactctatctcttaggtagcttaacagcatttgaagctccagatatattctactatatacttaatactagagaaactcatttgagatcacagtttgactttcttacctggcacaacatggctgttaaactttcttagtgaccatacccatacattcacatttgctctaatgaagcaaagtcagttcacttgtaactgtacttctgcagcttcactaaggcattgctctccatacccttttcctattcatacaattatacctccaacctttaaggtgaaccatcaccttttaaagagcagagtctttactgttttaaaagtcttatggtaaataattttggacattttttaaatttgagattacagatgatcgactcctagacgcaccatactatgggtacgtaaagtgcctatacaagtaagatgtgcacaaagggaatgttcaccactgatttttaagaaaactggtatgtagtgccaaactcacctgagtatagaagccactagctgcctctaggaacagagaaaggtttgcctgaacttcactccgattcgggtttgctcgattctttgcctggccttgtagtgttgtgatctgattcttaaaggcatgattccagctgaaaacaaaatgtaattctatttggtatagcagtgactcactgggcagacactggtccccctgagaacaagaaagaactgtttgttataattataacacactagacagtaaacctgcattaaagttattcacttaaataactttatgctcccctttgaacaagactagacaagcagcagaatgcaactgaccttagtaaacacttaccaaatgttcgaataatcagactgtggcttcagttattaatcttttagggttactagagttagaacctacttaggaatcccggtacaaacttagaactacagtggtaagaccaaagtaaaagtaagctattaacaaattttcatacattttatcattgcaccaaaaaatgtcttctatcaagtggcatgcctggggggatggggggatggggggatggggggatggtggcggtggtttccttataaatattaagccatatttcttatttctctaaaacttatttcccacaacacttggttctatttctatttaatagttttgtttctcttggggttaatatttttgctaaagcttgaaatataaacttatttttgacatttcagttttggctattcaaactaagaaacaacacagcaagtgctgaaatatggcataccaaaatcctgttataaaatgcctttcattcattaatcaagttgtacagagagtcattttaaatttagttatggtgaagtacagttgctccctaatttggaaatcacagggggaaaagaaagaaacgaacaaaaaaacagaactaagaaggaaggaagatatactggcttcattaaaggatgcaaatatagataaagggtttacaacctacctggaaagtacctaattctttatcaacggcagcttttgagactcttttgaagcactggggttttttaatgatttctgagggcaatcactccctcagcaattttgatgccatcttatccatgactctaatatcaaaaatacgcgtttgagtggttgtgattaaattctattactaggtcttctaacaatataaaggtcaggtgtgcaaaaatcaggaaaattagattaggaaaaactaattttcaccacaacttaggtaaacagaatattcttgatttttaattttccaccaggctaatgtccttgtttcaatttataaagcaaggccttccatgaaaggaatttatttactcacttgggaatctggttatctgccatttcacagctcatagaaagaataagtggaatagcctaaatacgtaaaatttttcttagtcttgttggggagtgggggaaggaaatatctatttatttgattaaaaggaagaactttccttacaatttattttcctttgggagagatttatagaattgcatttatcaaagaaagcctgctctgaacacttccttttttaaatcatagcttaaacacaggactgaatacaatatagagaatccaaacactatttcttagcacttgaaatatatacagatttgtttttatgatatgccctaaacaccttaataaaactcaactcggaacatttctctttacaccaaaggtcagtttgttcaaaacatcacaaatattagaatttcttttttttcccattgagatagcttactctgaaataggttaaaaagaaacaaccaaattgttctcttctaaagtctcggtgagattcttgatcttacagggacatcccaaatggtaatacttacagatcctgttctactttcttgtctaaagcgtattccaaatcagtaacaagcattttctggtacaggtcctgcagagcctgcctggatgtccagacttcagctggacccagcttagaatctgagtaacaaaacaaaaacagtagatagataaacagatagttaaggccattacgccacaccaacaattccttcactctctattcaccaaagcaaaaacccgctttaaatacatatcacagactgctccaaaagttttatactactacatttcagatgaaactttcaccttttggctaatgattgattctttcaaaatacttctgtatttgtcttttagttttgaaataacaccatgaaatgaaaaaggcttaaaaataagagagagaatgattcaccctttgattttggtatggataactatgtatttacaccacaggaagtcatatgcctcataagaagtcaccccatttgaaacggtggactgccaagttgatctgtttactcttacattaataactgtatctctttgttcaaagaagcttttcttcttcttttgaatcattctcacaattgcccttacagaagcctcctgtcagctcacaatccagcagttgtttgagcattctgctattactcctactttcctactttgccaataaagtcttgacagtgagtgttattttaccaatcggtaggctgcttgtcaagacacttttgtgagcaatacgtacttgctatttaatgtaaatgagcagacaagtgattaaactgctcaagaggccaaatgagagactgggtgcaagatgaaatcaggaagtcaggctatgactacatgtaataccaaactggggctgtattgtctgccagagtcctacaaggcacattagcctttcctattactaggcttataagtgcaataactgatagtgagctgcctcaatagaagaacttaataatggacttttcaattatgtatttctgactgctagttagcctgtctggttgcatttcaaggttttgcaacggcatagtcttcactcctctttaggtttgctattagtatctacaggcaccataatcttattctgcacacagaatctcccagatattagagttaatcctcaagacagtctgctagaaactaaaatatagggtctattttttggtatcaggttcttggccccttattaagcttttaatgactaaataaatagatttatagatttattcaactctgcttcaactcatcggctgcagagaaaggattttaaggtatcattaactctgacccatcagagagactagcatttgaatgagcagacttaatatcttagggacaagtcaccttctgggtacaacagatgtaccccacaaaagtcaaaccctaagccttcttactgagggtagtcaagagttaagaaaatgtaaaaggtatatggactgcctgagactgctccatatataacttttatcacacaatgcagattacaatgccaacacaaagaggcataatagagcagagcgcagagctgaccccggcagccacagtatggagggtaatgacagctatgttaataataggaagaactgtaaactaagaaaaagtgatttgggcctttttttctccttgaacaagatgacagtgagattactcaaaattcttagaatactagcctgcaattctagaaattgagaaaaacatatccaaatagcccactgcctcttggttgtaaattttagcaggtatgcggtttacaacaagtttaactctctttgtgagtttcactgcagaaccaaaatcttcaaaaattagaaagagatccactagcacctacattttttaaaacatttcagcatagttacacagaaagcatgttgctatcatgctgtaaagagaacactttgaccactacatagctgctgccatgtacttcctaattttgcgttcaagtcatctgctccttttagtggctaagtctaattattgtttcaaaaacaccttggctattattgaaaacaaaaagttaagagagaaaagtggcaaggtagctcaacttcaaggactttcaatttgcaagagttttcctgaaaatatttttctctgaaggcttatttactatttaggtttggggaattataaacaggaagacataaacctaatgttggtacttgtatttatatggtagactattttgagccatctaagtaaaaattcaaactataaaaacaataaatactgaaaaaaccttttggcaaccaggacgatactacaagtagtataataagatgacacacttctcttaatttaatggtataaaataagttgtgaaaaacaaatgagtcagacagtacctgtcatgtcagccttcaggacttctgcctgcctgaaaaagggaaaaagaatatcaattagaaacaaactaggcctacccaatgtaagtaacactaaaagttaagtaaaatcatatgacagtaagaatgtaaattaaaaaaaagaatgtgtagcagctctatttgtggcactgcaaacagtgaccctgctttaacatccagaataataagatctcagcaaaccgatgtcactgcttagtcgttcacagggtcagcatgaactcttctaccaagtagggttcactttcttactgctactcccaaatccgatacatttaaagataacatttaagtgacatttattaaattaaaatttttctgtcaatgaggccagaaaattctgtgtttctcaattcactagccactataactattttaaatctccatcctcctcaaggtgatttctgccctcttcctcagtctcaactctttttagcataggacagttccattcctcaggaaaacaatgccctttctaaaggcttactatattcacagaaccctctctttcttactcttgttaaaacactagaggaagcgtatgtcttgtttaagaccagtaattccacttaggtatgctctttctagcctttgtaaaaacttctgatcctttaattaccacctgccctctttcaataatttaaaaagttccctctctattgggtgcttctcacagagtatttaaacatgccctacactttcacagactttaaaatcttctatcttatattctcatctaactgctgcttcttttctctcttcccaaattcttcaagaattgactgtattcaagaaatgaactcatgatcaacctccaccttcatctctggtttctctttctagagttttatacattactaaatgtatcatggcttcccagctgtgaaaagcagacaccgggaagtcatccatgacaacattctctcaaatccctgataatctatcaatgccaaataattttacctactaaatacatcttgaatctgtaattctccctttacttctttttcagtcactatcattcaagttataaccatccattgcctggactactgcaaagccaccaaatctttttctccacttcactcttgtctcctttcattctgcttgctctactgctatcagagggatctttaaaacatgcaaatctgacctcatcaactgccctcttaaaaccttttaatgatatcccactgcttttagagtgaaaatcaagatctttagtaaagtggaccacagagccctctgcactctgaagagagcctctgtactctacttctataattattctgttctctccttgatccttttgctccagtccctggacttctttctagattctccaatgtgtttggctcccttcacactcaaagcctttgtaaagaagaatccctttgctagaaatacctcttccccactttgtctacttacttactcatcctttgtctcagcagacattacttcccgaggaagctttactaaaaccctacatatgtgtgtgttagtcactcagtcgtgtccgattctttgtgacctcatagactgtagcctgccaggctcctctgtccaaggaattccccaggcaagaatattggagtgggttatcattcccttctccaggggatcttcccaaactagggactgaacccaggcctcctgcactgcagccagattctttaccacctgagccaccagggaagcccttgaaccctacatacatgaaacatattcttgtttcatattctcaaagcacttgtattttttcttcatagtacatatcacagattttaatgctcaccatcacaattcctatgcctacacagtcggcattcaacaaatattttttaagtgaagaaaggaaaaaggctaaattacagtcatatactataaaaaggtaagaatataaagttaagagatctccatttttagaaacaaaatctgacataaaagttagagaacagagacttaaaatttttactgtaaatgtttattatttaatatcaattgtgaattttagtttcatcaaaatataacatgaatcttttttcttagctttaaaacatttttaaaatattttttaaaaattaagctttcaaatataacagaagcataataggatgttataaaaaccacaagccatatgagaactatcactataaatgaacaatttcaaatacacagctattaagtgaactgaagtcgctcagtcgtgtctgactctttgtgaccccatggactgtagcccaccaggctcctccgtccatgggattctccaggcaagaatactggagtgggttgccatttccttctccaggggatcttcccgacccagggatagaacccatatctcccgcactgcaggcagatgctttaacctctgagccaccagggaatcccaatacacagctatacttaatcctaaaaaataacatcacatcaaattacattatccattcagcctagttttactgtttgctttgagtgctaaacttttgccattaaaaaaaaaaaaaccaacacttcacaaagtagttgatttatgtccttaaaacctaagatcatatttagaaatgcctcacctcttaacctaccagtgtcacaacctcttctcctttcattctgagtagccaagttactaaggatatattttacaatgtatccatatcctggagatccaaccagtccatcctaaaggagatcagtcctgggtgttcattggtaggactgatttttgaagctgaaactccaatactttggccacctgatgagaggagctgactcatttgaaaagaccctgatgctgggaaagattgagggcagaaggagaaggggacgacagaggatgagatggtttgatggcatcaccaactcaatggacatgggtttgggtggactccgggagctggtgataagacagggaggcctggcgtgctgtggttcatggggtcgcaaagagttggacacgactgagtgactgaactgaactgaagatctgcctaaagtgaagtgaagtgaagttgctcagtcgtgtccgactctttgcgaccccatggactgtagcccaccaggctcctccatccatgggattttccaggcaagagtactggagtgggttgccatttccttctccagaggatcttcccgacccaaggatcaaacccgggtctcctcgcattgtagcagatgctttaccatctgagccacaagggaagtcccaagatctgcctaatgaggataccaatttccaatcaaatgaagattatattgagcatataacaggaactatttccaaataatctgcttctctgataggccatcagtaagagaaaaactataattctaacagattctggaacaggcctccactgataaagatcaaaatttcactatgtatttttatataccatttttatataacctgtccaagaaatataaaactaaaaatctaaacacaaacaaaactgcaaaaatgtaataaaaactatctgacatgaatgtccaaccattttgaaatttcaagacttttgatacctccagaatgactagggaagagatgctcaccgctgagcacagttctctgctaggttctgaaagagacacgtgttaatgactaaaataactctgctaaactgaaatggtaaagagagttaaacagaaaataaaaccgtgggcgacagccactatgattcccatcccataaacaaggaaatcgaatctctgacatgtagaaataatctgtccattatcacaaagcaactaggtacaattaagtaaacttaagtctttctgactctgaagttcagattatttttatttcaagttggaattaaaaattctatgacataaaaagctaacacagacttatctaggttcagtttcgtgctctgttgattaaatcttaacatttaagtcaactagtctaaactgaaggtcagttcacaaaaaataaaaaacaaaccaaaaaaaaatcagttcatatcaggaaataaatacctgagatttctaccagaaagaccacaagaagtaaaattcatattctcatgcagtggtcagactgtgggtaaaatttcctccttcacaatggatcaatttttgtaaatacatgttattggaacagtcttgcctattcatttatgtatcatctatggctgctttctgctacaagagcagaggtgggtagttaagataaagactacatgtctcatcaagcctaaaacagttactatcggccccttcacagaaaaggtttggctgtcctgctccagggagtaagtatttgatcaaaaacaagaagtcgatatgtataaatccccaaacaaacagttttcccatatgaggagtcatcaataatagtctcctcagaataaagatttttatttgttgacatcataatgtcacaaagaagactgtttaaaaataagtttttttagatggtgtacaatatataagaaatcaacagatatgtgatcttaaaccaactgctttcacaaacattagcacaaaattgtctacttattttactttttttataaacagaaaatactatacctcaatgacctattggttttgttaaagatcaatattattaaagattaatactacaatgcttatataaagagatactaattttcaaaagtttcctcttggcttctagaaggtgtggccacatgaattcttttttattcttactttaagttgaaagaattaataaaaagaatgaagaatccaagaattaaaatcatcatgccttcagtaataaagagcagtatttaaaatataaagctttcaaaatactaaatatattgtctgtttgtaaataataaaaattaagcacttctatcaaacaagaaaaaagaaaaagccatttaaaggctaaacaaaatctgaaacattcagcgataaccaaatatgtttaaagccaaccatctgaaacaatattcttggagaccatggctgagaatcactatctataagcacatttaacacattctaatgcactgctgctgctgctaagtcacttcagtcatgtccgactctgtgcgacctcatagacggcagcccaccagactctgctgtccctagattctccaggcaagaacactggagtgggttgccatttccttctccgatgcatgaaagtgaaaagtgaaagtgaagtcgctcagtcgtgtctgactcttcgagaccccgtggactgaagcctaccaggctcctccgtccatgggattctccaggcaagagtactggagtggggtgccattgccttctcctctaatgcactaggtacactaaaatagctaacactatatttagcacttattattgccacattgttctaaagtaagggtttgccataaagtaatcatttaaccctcactatgtactattactgctcccactttatagctgaagaaacctaaggagatagaggttaagtaacatgcccaaggtcatcaagttagcaagtagtagaggcagcaattcaacatactgattccagaggctaactcctaaccactgcatcacagttcttctcttatacaagactgtaagggggggggggggggcgcggaatgtttgacaataaaagcccagagaactagggctttcaaaaattaaacattttacagtaattttttttataatgtcactagaggaaaaaactacttaatggtaattttctttaacaaatagcttgattatacataccactgatacaacaatgcaaggtaacgaatacagaataatctctcaagatcacacattatattcatggcttaaaaatatacaagatatttgcaagttaggggcaaatacagtgggggattcctttcacctggacgaacccccttccatctctgagaagaacacaggaatgtataagccaatgtcctctgaactcacagttgaggagaagtgaattagtctcttgttttgggaggcaacactaatttttttttttttttgaaatttaataaaagccacagcacatcttatttcaagataatttacttatttccataaagtactaaggagtattcaggatacgagtagccatcagttatgaccataaacataataacctgatgataattatttgtgttaaataacaggtcagagagtagacactagaaggcaagtatgtgcttacaaacgcagatgcacacacacacacacacacacacacacacacacacattcctgagacctttaaggtaacatcaaatctcacggacattcctgagatctttaaggtaacaccaagtctcacggtattcagttcagtttagttgctgagtcgtgtctgactctttgcgaccccatgaattgcagcacaccaggcctccctgtccatcaccaactcccggagttcactcaaactcatgtccatcgagttggtgatgccatccagccatctcatcctctgtccccttctcctcctgcccccaatccctcccagcatcagggtcttttccaatgagtcaactcttcgcatgaggtggccaaagtactggagcttcagctttagcatcagaaaaaaataactcgtgctgctctactgttggatctcacatagaaaaataacatctagggaaatgctgctcctaaaggagcttctcagtaagagataataaaaatactaacttgctttctctccctatggcacttcacagtctggcacaaattttcaaatctcctgatactccactgctctatatcacaacattcattcaataatctgtactatttgaacatgtgtacctagtttgataaaggctcaattctggtctaggaatctcaaagcatgagaaggaattactcttccaggcagagacaatatcacacaagaaaaacaaagctaagccagtgaaggaggtagactgacgcatcaatgcagggtaggaagccacagaggagctggagagtcacagcagactgcagacggtgaggccgcggatggcaggttaaggagctcagggtccgtcttttaactactaggaaatctatgctgggttttaagcaggggtacagcattgtcagaattgcctttttaaatgattacaacaagatgcatggaagatgggtttaaaagggcaagactggaggtaaggaagtgaaggaaacgaatggatggaaatgaagtggaagcatgaacggatggaaacgcctagattcaaaaatatttggaagtaaaatcagcagaaaataaagcagaggaaaccatctaaaatcattcccaaattcttgccttgcacatctgggtatctgactaagtggcggtgagcaagcagacatttaagaagagatgagtgtcaagcacaggggagacatcaagactacggacacaatgctggagtgatcagcacacagatggcagttaaaaccataggagtagctctaattgcccagaaaggcagaagggtggtgcgagttccctatcttcattctcaaaaggcagataaaagaatgaagaacaccaagaagaaactcacaggcacaggagggcaaaagaagaggataaacagaagggtagtcagcaacatcacaggcagtagataagtactctaaggactggagggcgtgttggatttagtgcagtgagggttaatgactgccttgtcagagaaagaaacaatgtcaaactgtagggagaatgaggaacaaataagagggagaagtttcagtcaactcttaagacactgggctgtgaagagaaataaaagggggccacggataaaagtttctttttttccaatgggagagacttgagcatgttcagaatgaagaaaagaagctagcggaaatgaataggttgaagatacaggaaagaacaagagtgatacagcatgcttctggaaaagatgggaagacatgagaatatgaaaaagacaggacgcaagactagctttcaaaagaggatgaaattgaaggaaagtagtattagaaagaattgtgctaggaaaatttgggagtggggcagggtggaaagatgtccagagaactcactgctacattgcctcaagttcggagataaagcaggaaatcagaccagtgtctaaaagtaagagggagattaactgaggagaatggtgaacctatgggataataacaaaatgaacaggcaaaagagctgagaaaaagtgatgagtacagtacggatcacacacaacgaaaaaacgtgaaaagacagtgttcaggacgatatccccagcactccgaataatgcctggtatgtcacagctgttcactacaattttgttgaattaatgaatggtaaaatgtgtatcatactaaggcaattttatgtaacacaaaatgatacagaagaaaaaagacttaggtctgaatctgggtttatattaatagtgctaccttggagtttcaagaaacctcatcttcctcatctataaaacagggatacaagctccctttcagagctgctaccaggaataaacaaaacaggtaagtttcatacaggaacttaggtgataactccaagttgttgttgttgagtcactaagtcatgtctgactctttggccatggactgcagcacgccaggcttccctgtccttcactatcgcctggagtttgctcaaattcatgtccattgagataactccaagagagagggttaacctgtgacatgaatacttcagtgaccaccaaattacttttgagtcactgacataggatcctttctgaagcaacatactaggctgaaggcggcaacgttccaaggtagaggtaaaaaatcctgggtcatctatcaccacgtaatgctaagtaacaagagaacctgaatgttgtaatgaccacattctagtatgcacagaaaataaaaacaagagatgaatatgcaaaaattgcaaaggacttacattattgtattttttgtttctcctcaaacattagttttgattatataaaacttaaagaaatacagtttaaagttggatccgcaaacacacttttctcctctctaaacattagttttgatcacacagcttaggcaaacaggtaaaagcctgacacgacagcacatcgagcaaagcatgaattacagaatgccatcgaagctcatctcctaagaagtaagcagcagcttacataatagtacaggtgaccacttactatttgccaggtgcagtttatctgctacaatatactattaaacctttaattctcacaagaaatctatcaggtaagtaactaaagtgctattcccatttttctgatgaggaaaaagttaaataacctgccccaaatcacacaactgggaagtggcagtttgggttccaccctgcggtctggttccagagctcataagcattatacaagaaagcaaggcttctggaatggcctggctctaggtgcctctgtcatggtatcaacttgtagggacaaccagacttcacatttaaaagtctcatctctgaccccaagcaccttcacactatcatttaaactgatacaagctactgtgagaagagttaccagctcactgtgtggttggagagggcttctcttgcacaccaccatatacctatttctacaggcatctagaaggcctgactgtatgcaggctaacaataacagaagcaagaactgaggctccttgtattcaaatgaactgcaatatacgtaatccaaaacaggaatttttattctaaaggatagtccaccacaagataaatcccctctgcttgccataaacattcagagaccacgtacacaaacataaaatttacatttacgttactaaatgtttaaaatttttctttggactgtaagatataaatgcttacgacaaagtaaacacacaaggttcttatgaggctgcataagttaaaacaaaaaaaccgttagcactccctcccccattccggccaatatcaaatgcttccgaaagcttctaattcttctactagtgttcacagtatgtgagtactttaacatatctctaaaaggaatacaaacatgtagaaatcccttgtaatttttatcctacctaatattacttgatttcagatgctcctctgatttcaagtttccggtcctcatctgggacttaaatgaaacgttttctcccacaatgactatctgcaagaacatccaatttctcataaggtagaatggtttaagacattctagatagaggagaggaggaaaatatgagttaacccacaatgacagagaaccctcttgaagaaagttaaattattttctctttaaaatgatcaatgtcaaaggcaaaagggaagaagatatcatggcttttttcctttttatatttagtttctgagagtacacattttaaaattctgttttgtatatatctaaaattctagtttggtatccaactgttattctaatctccctgcctgaaagctgagtgatctctaaaggacaaacaggtatcagttacccagaaaggttcttgtggtaccaaggttcaggagcagatggctggtccaaactggactacatatggaaggaaaaccatgtaaagcaattaaaccacaattatagaagatacaaaaaagcttacattctgagaccaggtaaaaggtaggtatttagatgttcagtcactcaatgaacaacgtatgcatgctaagttgctttagtcatgtccgacttttggcgaccctatggacttgtggcccaccaagctcctctgtccatgcgattctccaggcaagaatattggttgccatgcccttcttcaagggatcttcccaacccagggattgaacctgcgtctcttaggtctcctgcattggcagatgggttctttaccactagcaccacctatgaacccctaatgaataataatttggttatttctctgtactaaacagtgttaaggactaggtagacaatgatgaaaaaaacatgatagctcctaccagatttaaattctaatgtggagacagcccaacaggaaagaggaagcagcagaaggtagtggttaaaggcatgggcttggatatcacactgtactcaatggcatgctgggaataactcaagccacttgcacaatttctttcagataccaatttaacttaaagatttgggcaaaataaattgagtaattattattaaatactgataactgcttacatttaaaattattacgtggcagattctatactaaatgcttcatacactgatctcacagaatgggaaaataaaatgtcatagttaagtatcattttcagactgcctgggttcaaacctcactctgctatttactagctgtgtaactttaggaaaattacttctctatgccttaattttatcagcagtaagaaggagataataaaagtacccacttcattgagatgttttgaggattaaatgaggtaacagaaataaaacctctaggattgttccttgttatataagccctcaaaaactgttattgtcattattatcattataggtattattaatcttcccaacaatcctaagatgtaaatgctattattatcctcattttaaaattaggaaattgccagcctatgtccgatgcaggatacggcatacttggggctggtacatggggatgacccagagagatgttgtggggaggggagtgggaggggggttcatgtttgggaacgcatgtacacccgtggtggattcatgtcaatgtatggcaaaaccaatacagaattgtaaagtaaaataaaaaaataaataaataaaataaaaataaaaataaaataaataaaattagggaattgaagctgagaatccacattaattgattctagaatagaaaacaaagttattcataattttaaacaataaaacatcaattattaagagaaatctcaaacatgcagaaggtctatgtagactctggctccatacttccaacacatatatttaatcacctgtgactttagttgtactttagtggaaaagactaggagaaaatacctcatgacaaaacctaagttcactggtacagcatgttaagtctcacagcttccaactatatatgttaggacccaataaaaccaaattacttttagttccctgctattttgccccactgcatcttgattcatgctttcactcaacctgaaatgcctttccccttccttctttgtctggttaaccccttttggtattttaagactcagcaactcctgtaagaagggacttggcttggccaagccttcccaatgaatcttaatgcccacttctataacagcactcagagcactatgatgaagttattcattcactcatttcctgcactagaattatttattctattagatgatgtaggccaggatggtggttttcaacactatgcttaaaaaaaaaaaaaagacattctttgcaacaatgtttttatcttcctgaaataaaatacaagatgatataaactatttatttaacacgttacaatgaataactaaatgccttctacaaggaaaaataaaaagaaagaaaattttaataataccagtatcacaataaacaaatggttgggtaagactattctttaagaaataatgaagttatcaatgcttgtacataacatgtggcttgtggtatctcagtctcccagaccagagactgaagcccggtcgatggcagtgaaagtgccaagtcttaatcactggaccactaggagttccgttcctatatatacttttaagagaaggttaacagaattccaaagacagggaaatgaaagtaaaaatctgagtagacattagaattaaaatgagtttcaatgtaaataacagccaatcaaatttactggaaatgctaagagaaaaataacctgacatggggacaccatgagtataaagagctgaccttaagaaaataagggtgtgactatatcccttaataggtaagcaggaaactaatattatgttggaaaaagaaacagtaacagttctttatgtaaaacaccatataaatttaggttagggaaaagtaaagtacaacttcccaatctggagtataacatgggatacggacaacttaattaactcagccgaaacagtattaagatactatctgatttaactgaataaaataatctgtacattattatggtatatctagaaatttctacttctgtggtctccaaaatttaagagacataaaaaaagtcaagtctgacttttccacccaagaaccattatttaacctgtacttccagacatcagtttatctagtcaggttccttttttctttattatttacctatttgtctaaacaaaggggtaatgcattataatcaagtaatctaacaaatctgatacaaatcatagagggcctatagtagacatgaatcatacacctcctggcatctgcaccattgtgaactctcttcacacagtgaccttggggttggccgtgtgacttactctggccaatacttcaggaagtgagacacgaatggaagcttgacaagcccttgtgcatctgggctggcccttctgtaacgccttcacaactttatgaagtagaggagacagacgacttggaaagaggacaccccattttcccacctatcacaggcatcccagtcgacagttcagacattcgagtgaggccatcttggactattcaggacactgagccactggatgaccagccatccaacttcacctggagagtctgagagaggggacaccttcggacattctgagcaaagaagctccatgacctaacctcgagtttgacatgttccacggagccactatgtcaagaatttactggcttgaaccagtaggcagcaatggagagaataaaatgtgactggactttgaccaacagggtttgctgagtgaaattttaaacagagagagagaggcaggaatcaaaaatgattcatgaggatttgtcatttactagctaaagataaaagtaggcatagggtaaagagttcattttggacaacaatgcttggcacatggtgttatataaaccacctgctattgttttttacgatgatgataactttaagacattatacatccatgtgaatgtatactagcagttattaaagaatctgacatttaaaggaaagatatgtaaccacagaaatccaccttgggagtcatcagcacaaggcaagaaatgacaagggaataataaaaagacaattaatgaccacagagaaagaagggaaacttgtcgaagttttgcagtgcagtggaagccaaatgaagaaagagcttcaagaaaagaaggtagaatcagcaagtgctgctcatgcagcaggtaaaatgaggcctgagaactgattactggattcagtatgtggaagtcactgcggatctcgttaggaacaatgtggacagtgaagtgggagcctcagcccatggactgactttaatggaaaataggaggaaaggaacagagactaaaactgagtttagatacctttttctaggcaggagaggcaacagagtgagggtcagaagtttttaagatggaatatacattcttttatgggatggaataggataaataacaagaggaggattcaatggaggaaaaaaaaaaacaggctgaaaacaaagtctcaggaatgccagagggggttatacgagtttgtttaaatataatacatttaaaaggctaaaagacccctgaatgaaagaataaaacttgaagtgaattatataaagaaagataactaataatcagtgactacggtgaatggcaagtggattacataaagtgaaagtgaagtcgctaagtcgtgcccgactcttagcgaccccacggaccacagcctaccaggctcctccctccatggggttttccaggcaagagtactggagtgggttgtcattgccttctccagagggggctctagggaggcctgagtaacttcaggacagggactggattacataaaccattctcaatttaactttcatagcaacctgaagtaactactattttctcggttttacaaacaaacaaagactcagagattttaggaaacttgcccaagatcacaaaggtagtaaatgctaggactgaggttcaaatccaagtgtatcagaattccagaaccttgctgttgctattcagtcgctaagtcgtgtccaactctttgtgaccccatggactgcagcatgccagtctcctctgtcctccatggagtttgctcaaattcatatccatttgagttggtgatgctatctaaccatttcatcttttgctttcagtatgtcccagtatcagggtcttttccaaagagtcagctcttcacatcaggtggccaaagtattggagcttcagcttgagtccttccaatgaatattcaaggttgacttactttaggattcacttcagttcagttgctcagtcaggtccaactctttgagaccccatggactgcggcacaccaggctttcctgtccatcaccaactcccagagcttgctcaaactcatgttcatcaagtcactgatgctatccaaccatctcatcctctgtcatccccttctccttctgccttcaatctttcccagcatcagggtcttttctaaagagtccattcttcacagcaggtggccaaagtattagagtttcagcttcagcatcagtccttccagtgaatattcaggactgatttcctttaggatggactggtttgacctccttgcagtccaaggggctctcaaaaggtcttctccaacaacacagttcaacagcatcagttcttcagcactcagctttctttatagttcaactctcacatccatatatgactactggaaaaaccatagctttgactaaatggatctctgtcagcaaagtaacatctctgctttttaatatgctgtctaggtcatagcttttcttccaaggagcaagcatattttaatttcatggctgcagtcaccatctgcagtgattttggagcccctcaaaataaagtttgccactgttcccattgtttccccatctatttgccatgaaatgatgggaccagatgccatgatcttagttttcagaatgttgagttttaagccaattttttcactctcctctttcactttcatcaagagactctttagttcttcttcgctttctgccataaaggtggtgtcatttgcgtatctgaggttattgatatttctcccagcaaatgtgattgaagcttgtgcttcatccagcccggtattttgcatgatatattctgcaagcaagttaaataagtagggtgacaatatacagccctgacatattcctttcctgatttggaaccagtctgttgttgttcatgtccggttctaactgttggttcttgacctgcatacagatttcttaggaggcaggtaaggtggtctggtattcctatctcttgaagagttttccacagtttgttgggatccacatagtcaaaggctttggtatagtcaataaagcagaagtagatatttttctggaactcatcttgcttttttgatgatccaatggatgttggaaaaatcctttaggattgactggtttaatcttacagtccaaggaactcttaagcacagagtcttctccagcaccacaatctgaaagcatcaactcttcagcactcagacttctttatggttcaactctcgcatctgtatatgactactggaaaaaccatagctttgactatacatacctttgttggcaaagctttttaatacactgtctaggtctgacataggtttccttccaaggaacaagcaccttttaatttcatggcttcagtaactgcccacagtggttttggagcccaagaaaataaaatctgtcactgcttccacattttgcctttctatttgccatgaagtggtgagaccagatgccatgaccttagtcttttttaatgttgagtttcaagccagttttttcactctcctctttcaccctcatcaggaggctctttagttcctctttactttctgccattagagtggtatcatctgcctatctgataacctaaacttcacttattcattattccataatacaatacagacctcaattttcaacaattcacatattcaaaattaaattgtgaatatattattgcttatgattttattcagtttggctttttaatagctttaatttttaaagcttttgctcttcaacatagaccattaaaaaaagtgagaaagcaagctaatgtgtatgtgtatacataaacacatacaaaggctttacattcaaaacatattaaagagaactcagtaataagacaatccaatttgaaaaatgggctaatgatttagacactacaaaagaagatacgcaaatggccaataatcacatgaaaaggtgctcaacatcttcagtcatctgaaagtgcaagtctacgagataccaatgcatgtgcgttagaatggtgaaaatcaaagagattatcgataccaaatattgaaggaaaggatgtggaataattagaacccttataatactgctgctgctgctgctaagtcgcttcagtagtgtccaactctgtgtgaccccatagatggcagcccaccaggctccgctgtccctgggattccccaggcaagaatgctggagtgggttataacactgctgctaagagtaaaagaatgttataattgtgttgggaaacagtttggtaattttcataaagttgtacatgtactttctatatgacctagcaattccactcctaggtatttaccaaaagaaatgaaaacatgtccatgaaaagacttttatattacattcctaaagctttattcacagtagcagaaaagtagacacaacccaaaggctcattaaaaggtgaatggataaactgtggcagtcatatgatgaaacagttgttgttcagtcactcagtcatgtctgcctctttgtgaccccactgactacagcacatcaggcttctctatccatcaccatctctgggagcttgctcaaacacatgtccattgagtcagtggtgccatccaaccatctcatctctgtcgtcccctttttctcctgccttcaatctttcccagcatcagggtctttttgaatgagtcagctcttcatagcaggtggccaaagtatcagagttttagcttcagcatcagtcccttcaatgaatattcaggactgattccctttaggatggactggttagacctccttcctgtccaagggactctcaagagtcctctccaacaccacagttcaaaagcatcagttcttcaacactcagctttccttatggtccaactctcacatccatacatgactactggagaaaccacagctttgactatatggacctttgtcggcaaagtaatgcctctgctttgtaacatgctgtctaggttggtcacagattttcttccaaggagcaagcatattttaatttcatggctgcagtcaccatctgcagtgattttggaggccctaaaataaagtttgtcactgttttcactgtttccccatctatttgccatgaagtgatgccatgatcttagttttttaagccagctttttcactctcttctttcaccttcaccaagaggcttttttagttcctctttgctttctgctgtaagggtggtatcatctgcatatctgaggttattgatatttctccccgcaatcttgattccagcttgtgcttctcagtaataaataggaacaaactattgattcatgcaacaaagagaattattctcaaaaacattacgtcaaaagaatctggacacaacaagagtatgtactgtactacttcatttattaagttctggaacaagcgaaagtaatcttttgtgataaaggttaaaataatgattgcctgagatatagagaaacaagtaggggtaggggcaggactgactacaaaggggcctgggtgaacttattttaggatttggaaatgttctataccttagctagggcagtggttagaggtatatgttcatcaaaattcatgactgtgcacttgaaatgagtgtattttcattatatataatgagtacctcaattaatgtgatttaaaacagtatatacatgatcataatctgattaaattcattacctgtatatgcataaaatgcatatcgtattttcacaaaaaaagattggacagtgtgaacagtgcttgtggcaatttaatattacagttttttattgtaacattttaattttactcaatgtataatacccttacaacaataaatgactactaaatatattaatgtcctaataagccaattattaaatattttaaggttagaatgctttctgcatagaaagctttcactagtcagactaaaatcatttctaataaataaatatcctttcccattaagtttaaaagtacttcacttcttccaatctaaacttcctctgatccggcttttcccctccagcatccaccctaatccttgcctctgctgagtcgcttcagtcgtgcccgatctgtacgaccccagtgacggcagcccaccaggctcctccatccatgggaatttatcggcaagagtactggagtggggtgccattgccttctccgaatccttgcctctgctgagttgcttcagtcgtgtctgactctgtgcgaccccagagacggcagcccaccaggctcctccatccatgggattttccaggcaagaacactggagtggggttgccatttccttctccaatgcatgaaagtgaaaagggaaagtgaagtcgatcagtcgtgtctgactcttagcgaccccatggactgcagcccaccaggctcctccgtccatgggaatttacaggcaagagtactggagtggggtgccattgccttctccgaatccttgcctctaaacttttttaaaagacaatatgtaagtactgagttcactttcccattatcccgtcacttttaaactttcaattaggtgtccatctgtaccactgtaacaaatttctcaagagttaacaatgactttgcccaatttaagggccttttctcagtcctcatgtttcctgaactctgcagtatttctcaatactatattgtataagcattctttcaaactttagcccacatcaaaatcactaagagatttataaaatgattgctggaccttatgctcaaagtttctgattcagcaggtctgagacaggacacaagaatttgtatttttaataagttcccaggtaatgatggctgctcctaatctggagaccactctttgagaactactctattagcgcaagccttcattaaagctttctgcacacttagctgaccattcttcttcacagtttcctgacccttcctaccttttggatagatcatttcttgcctctttctgcttccacccatctagattaacaaaatcattaagaatgaaagttaagctttattatcacttggcacctgttccctaagtgtctaaccctgatacccttatacttctataattccttcccatatctaacatcacacacaatgaaaagctaaaagcactctcattacttttattcaacccagtattgaaagtcccagcttcagcaatcagacaagaaaaagaaatgaaaggaatccaaattggaaaggaagaaataaaactgtgcaggtaacatgcatgatattatacagaaaacacattaaggaaaccaccaaaaaaaccactagagcccatcaatgaattccataaagctgcaggacacaaaattactatacagaaatctgttgcacttctagacactaacaatgaattataagaaagtgaaattaaggaaacaatttcatttacaattgcatcaagaagaataaaatacctaggaataagcctacccaagaaggtaaaagacttgtacttggaaaactgaaaaaactgattaaagaaactgaagatgacataaacagatggaaaaaattagtattgttaaaatgaccaaacaattcaaggcaagctacagatacaatgcaatccctatcaaaataccaatggcatttttcacaagactagaacaaataacttaaaaatttgtacagaaacacgtaacaccctgaaaagccaaagcaatcttgagaaagaacagagctggaggtatcatgtaccctgacttcaactatatgacaaagccacagtaatcaaaacagtatggaattggcataaaaatagtcacacaggtcaatggaacagaatagagagcccagtaacaagctcacacgcttacagtcaattaaccaacaagaaaaattggacagctggaaaaattggacagctacatgtagaagaataaaagtagaacatttcctcatgccacatacaaaaataaactcaaaatggattaaagacctaagtgtaagactggaaatcagaaaacgcttagaagaaaacataggcagaacactttgacacaaattgtggcaatattttgttagatgtgcctcctaaggtaaaggaaacaaaaataagtaaaatggaatctaattaaacttaacacattactgaccagagacatattaatacattttttgttacccaaatatcacttattggagtgtttcaatattcaccagctacaggcgttagcttctgcaaaaatcccctggtcaacaatgtgttaaaagcttttgcacagcaagggaaaccaccaacaaaatgaaaaggcaacatacaaattgggagaaaatatttgcaaacgatgtgacccacaagaggttaattttcaaaatatacaaacagctcatacaactcaatatccaaaaaaaacaaaaacaaacaaacaaacaaaaccccctaaaaaacggacataaaacttgaatagacatttttgcaaagaagagatatggctggccaacaggcacatgaaaagaggctcgaacaacactgttaatcatcaaagaaatgcaaatcaaaaccacgatgagaaatcacctaatatctgtcagaatggctctcattagaaagacctcaaataatgaaggctggtgaggatgcgggaatttatatccccatttctggtgggaatgtaaactggtacagccactgtggaaaacaatgcagaagttcttcaaaaagttaaaaatagagctaccacaggatccagcaatcccactcctgggtaaatatcccaacagagcaaaaactctagtttgaaaagataaatacatcccaatgttcgatgtggggagccagcatggggaatcccgcccgtggcaaaggtcatgaggaagggggcctggcaaaaagcaaaggctgagatcaggcctaaggggtacccctggattttcctgagcatctacccccaagaccagagtctgcctgctttattgtgctgtgccttccactcttctgacataacagggggctatccctgaccacctttctctggaaaaagttaacttagagctccaactggtctcctgcatatgaaaagagtgtctcagctcaaacccctctgatggctctctaacttgcctgacagagacttttacaacttgtgattgtttacagcccctcaaccgcgagaggcacgcagcttaaaacatcttaaacatatagcgccttttctaaagagctaagaattatattggtgatgggtttcactgttgagtcaatgactgctgccaggcctccatattctttatcttttaggcacctggaggatattaatcaatgtaattgcgatatagaaaaaggaatatagtagtttggatgttagcaacactagacttttgagttagtgaactttctctttgttataaatcactgtactcctctttccttgttataaatcgttgtgtccttgctatgtaagaatgtaactttatttagtgctttctgagagtggtaccagactttggaaagaacaacacttttaaggcaaataagttttctggttgacaggcccttatcagaaaagggccataaaatgctaataggcctcctggccagaagatgatgtaaatcacctaagacttgtgtatacagtaggtatgcagagagaaagcctggtctcgataagagtcagggctgctgacgctgcataactttgtattatccattgatctctacgtacaaccaaaagtataaaaagctttctcagacaataaaggatggaccagtcaccggaaagactggtttcccctgtgtggtcttttctccttcttttctggctgaattcccatctggagtgtggaggctcgccatgtctacttacttgccctggcttctaagacccacgcaagagggagcccaaggtggggcaccctccgctattcaagcgggcgccggtggcctacataggtggtgcaagtttcttgtcttgaaactttactagctttccatgtaaaccaagttattcagcctcttttctccactaattttcctactacactattctttcccaatctctcttttctaattaaatagtcctttctaagacaccgactccgtccccacttcaaattccctggatccaccagggttggaccccggcattcacagcagcattatttataatagccaagatatgaaagcagcctaaataagtgtccatcaacaagtgaatggataaagaagatgtagtataaacacacacacacacacacatatcagaatactattcagccacaaaaaataatgaaattctgccattcacaacaacatgaatgaactttacagtctatgctttgtaaagtaagtcagatagagaaagataaacattgtatgttatcacttacatagagaatctataaaaatcaaacaaactagtgaatataacaaaaaataaacagactcacatattagagaacaaaccagtggttaccaaagaagagaaggggaagaagatgggtgtggggattaagaggtacaaactactgtgcataaaataaactataggatatactatacagcatggagaatacagtcaatattttatacatggagtgtaaactttaaaaactgagaaccacaatgttgtacacctggaattatataatataaatcacctacatgggaaacagatggggaaacagtggaaacagtgtcagactttatttttgggggctccaaaatcactgcagatggtgactgcagccatgaaattaaaagacacttactccttggaagaaaagttatgaccaacctagatagcatattcaaaagcagagacattactttgccgactaaggtttttcctgaggtcatgtatggatgtgagagttggactgtgaagacggctgagtgccgaagaattgatgcttttgaactgtggtgttggagaagactcttgagagtcccttggactgcaaggagatccaaccagtccattctgaaggaaatcagccctgggatttctttggaaggaatgatgctaaagctgaaactccagtactttgggcacctcatgcaaagagttgactcattggaaaagactctgatgctgggagggattgggggcaggaggagaaggggatgacagaggatgagatggctggatggcatcactgactcgatggacgtgagtctgagtgaactctgggagttggtgatggacaggaaggcctggcacactgcaattcatggagttgcaaagagtcggacacgactgagcgactgaactgaactgaacacctcaataaaaaaattaaatgttggtaataagcagtatctcatacgctactagttaacatttactgagtgttggtattgctgtaaagctgtaccaggacaattaacagaaagcccttccctcaaatgctatcagggaatggtgaaccaacataaagtaatctgatcaattaaagagactgagaataaaaagaaacatcttgtcatttatctgacaaaattctacgatgactcaaagattttctgcaaggagggacttttcaaagacaatgtgaagtaacatgaaagaaaagttcagactgtgagttaacagaggaaggctgccctttttctttagtaaaccagtcttactcactttcaggtgactatgtgtttaagaagaagaaaaacggttaattcaaagatgtcaggccacatatgaaaccttcagtaatctgttactgtttttaaaagtcacactgaattttccttttaaagtaatttatccaaggtttgaattttgtacatgcaaaactatgttccttagtatcagaagctaacatctgaatatgtctatgtaacaacaatataaagtcaataaggaaaaggcaactccagttttctttacttaagttgccaaaactggcaagtcattttccacttgtctgattagctcaggtgggtcagaactatttttaccgataatagctggttctcagtatccccaaggtcctgggaaatactgtatttaagtagcaatactgaagaagaaaactgaagaaagaacagctataattgagagaagagtggcagaccaactagtcagtcctggttcatcagtttattaataaattaatttcaaatacagaagaaaaacaatcttccctagttccccttagtaagcactctgagaaattaacctgccctctatcttatatttcacacacaaaaaatgcattaggaagcttgagattgatgagatcagtttgttcagactatatattcatatttaaaatatgcatattttatgtaagcatataataataaacataaataaaacaaaaataaaagcagaatcctacaatctcaggcaaattggaaaataaaactatagaggtagagtctatatgatacatagttaaaaacatggattctaaagcctgattcctgggttcaaaccatggttctgctactctatgtatgaccttggacttaactattctgcctctctgatctgctataaaatgaagctaataatatatacctcatagggttgccgtgaggattcacaactgaagaatgtttggaatagtatctaacaaaaaataaaactgttggcttattattaatcaggtcaaaagcacaaatcaacagcctctctctataaagttatcacaccttactgctactctatgaaagcttcaatattaaaggtgaagaaacaaaaagtacattagcattgccagattacaggtgactggaagttagtccagaatccatatggccgagtgtctagggcacaatcattaacctctgacactaagtcgtgtccagctctttgtgaccccaggctcctctctccgtgggcttttctggagacggttgccatttccttccccaggggatcatcctggcccagggactgaatgcctgtctcctatgtctcctgaactgcaggcagattctttacccactgagccatcaggaagcatgcataatcattaagatgcccttcaaaaacaataaacagatcaaaatgattcctaaaaactttttataaaatcataaaacagcaaacaaaaataaagcgtatatgtatatagccacaaaaatcagggtagactgtatgtatttcctaaatattagtacaacacaaacacaagtaaatcctcacacaaaagaaatcaattccctgttatcatttaaaatgagagaaatacttatggtaataaacttctgagcacttccatcacttgtagcatcacaccagctgccaagaatagtggagaggaaagaaagtcataggtatgaaaaagcagcggagtaacaggtataggaaagcaggaaacttggagattttattagtttggtattgcattataacattttcaaactcctttcatagtacgtggctgtcattcgcagattctaaatgtttctctcatttcgttttacctcacttgggaatctggatatctgaaataactaacacaaggaaggaattatgggacttccctgatggtccagtggttaagaatccacctgccaacgtaggggaccacaggttcgatccctggtctgggaagaccccacgagcctcagagcaactaagcccgtgagcctcaactactgaagcctgtgtgccgcagcgcctgtgctccgcaacaacagaagccactgtaatgagaagcccctgccctgcaactagagactggcccctgctcgccacgagagacagaccaggtgcagcaaactgggtctgcactgacagacccagtgcagccttaaagaaataaataaaaatctcttcaaagaaattatgtccacactcaggtctaaaatttttaaaaagtgactcataatcatcttccacctgaccacctctctagcctatgtcctgccattcctccacatacacccgtcacattagtgtgtaggtcacaatacctttgcaaaaatgtacctttcattggaaatgatcctatgaatagtattcaaggctcttggaattttccccatataacagtttataacacccatcatagtatcctcagtaaccccatttccttaaaaccaatcatctaaataaactgctacaattaagttctgtttctagttctctgagaagattaaaatggccagaattccctggtgatccaagagtgagggctcggagcttttactgccaagagcgtgggttcaatccctcatctgagactaggtgtaagcctcatggcacagacagaaaaaaaaagtaaacaaataaatagattaaataataaaattataaaatggcataagtccaatgcacttgtattcacagaactgtccctgatccagtgatctattatagttccagaacttagtatgtgctaatgcttagttgctctgccatgtctgactctttgtgatccatggactatagcccaccaggctcctctgcccatggggatcctccaggcaagaatactggagtgggtagtctatcccttctccaggggaactttccaacccaggaatcaaaccggggtctcctgcattgcaggtggatttttcaccagctgagttaccagggaagcccacaacttgttcttggtatatgtaagttcaaataaaggaaaaaaagaaaaaaactaatgaaattcattaaaaataatttaggacaactccgtaagaatgtgaggtttttatataacaaataatgcactgctactactaataattaatagctcaatttaccgcttcttttcttaacccaggtataaggcaccatgctaagaactttcactgtattatctaatttattccttctcaaaccctaggaaacatattatatccactccaccactgaggaaactggaatcaaaacaagatagataacttacccaagatcatacaccagtttccaaacccagggctgccagaaaggaaaggccttgctcttaaatcaccataccgttaagtgctatacttggctaatgctcgtatttggagtatcaggctaaactttttgataatacagctccattttaaaagtaaagtaacacactgacaggatacatttttcaatataagaatcagtctttatgtaacaagaaaaagcagaaaaaaaaaaaaattcaaacagagttaaaaaacaaaacaaagccacggaaacacacagagacagaaacaaggccagagcagagagtcatcacagacgggagtcaactgaagtgcattcatgcattcatcaaacgaacattcatcaaaaatgcaaagatcccactatgtgtcagggaccgtggaggccttagggacacaattattagccaaacagtccctgagctcaatttaaaaattaagtaaatgagagtctacggagttaaaagcagagaagcctttggtgacctgaccaagcacagtttcagaggaaaggcagaggtagaggccagagagcgctgggctgaggaagtcagcacagaccatgttttcacatgatgaacggagaaggtgaatgacagagcgaacgctagggaaggacagggcgagggaagcctgcacagatgcttacagcaaaacaaagttccagtaaagagggcaagggctagacataaaaacaaggatgagacccaaagcacacacacacaaaagcccaccttaataaggaggatgagaacctttccctttctaagagggacagaagcaagaactagcagaaggaacaggaagcagatccgtcccaccagaaggcttttgttgttatgttcacatagaggccatctggtaaaagttgtaaaacttcaagaaaaaatactaaatgtttaaattaaaagtacagggaagaaactagcaaaacagagggaaaaaaacaatagatattaaagtggtagtctatacatttcaacaattggccagtctgtaattttgttttcaccagcaacactatcaattatacccaaagaagtttattttcagaatcattcagaatgaattttcctagactgggagaacaaggagactgagaacactggtaagacaattaaagtagtatctataaaagggcagaagagaaaaacaggaggagaaaggaaagaaaaaaccaggaagtgactaacagcgagtaagtctggaatctacactggaagtcctgaacagaagcagctggattagagcaggtcaggatgtggtcaaagtgaaatggtcgaatgtaggactttagaagtacaagaatcctgaagaataacaaagtctgagggataacatgggcatacgtgaaggttagtatgttaaagcggaataagagatcaaagaacaacaacaacaaaaaaaaagagatcaaagaacaagaaaaggactgctgcgtcttgaatgagtgtccaagaaaacgtcagttctacgagacgagatgagacatagctttggaaacacaaatctctatctccctcttgaaggttcataatacatattagcatattataagctatgagaagtcctaaataaagaatccagtttaattctgtattcttattttgccttggaaatactgagactcctaacacacgtgaattggccacattcagcagaacacactctgggaaacgctagagtaccagataggcttgtctatgtgcgtgcttagtcactcagtcgtgtctgactctttgccaccccatggactctagcccaccaggttcctttgtccatggggattttccaggcaagaatactggagtggattgccatgccctagtctaggggatcttcccaacccagggactgaacccaggtctcctacactgcaagcagattcttcactgtctgagccaccagggaagccttttcaatgtataaagacatcaaagaatctgcttcaaaaaaaggtgaaatatcaatacgtgaaatcttcaatactggtgatcacgtacagaaaaagttacctggggccagaataaactgtactgcttcccaggtggcacagtggtaaaggagccacctaccaacgcaggctatacaagagactatggttcgatctctgggtccggaagatcccctggagaaggaaatggcaacctgctccagtcttcttgcctggagacttgcatggacagaggagcctggtgggctacagtccacagggttgcaaagagcagggcatgactgagcgcagagacacaaactgtacaaacctttctggtactttctggcactatccaccatgtattgtctccctactgctgctgtaacgtattagcacaaaattagtggcttaaaacaacacaaattttattctcttatataacatccaaaagttagaagcctaagtgagtctcagtaaagcaaaatcaaggtataaccattgctatgtggctttttggaggttctagggaagaacctgagtttgggcttcttcctggttcttgagaccacctgcattctttggttgtgacctgcttcattccaacaggatgctctctgtctctggttctgactcttctgcatctttcttccacagttaaagggttcttgtgattatactgggcccaccaaataatccatgataatctccttattttagaattagctgattagcaatctcaatcctgcccacgcccccataacataatatattctacaggtttggaggattaggatgcagatgtcttttaggaggctcattattctgcctaccacacttaaatatgttaaacatgcataccctgtcattcgtatgtgtgcaccaggatgctcattacagtatttttaaaaataataataaagtactggaaacaacatacattttcattgttagcagatcagcttagaaaattatggcactcctataattttcagcatgctgaggtttccaatgatgttacagacatctaattatgaacacatctttgatacaatgttcagtgaaaaaaaattataaaactatatggtttagcccaatccctgttgttaaaactatatacatacatacatgtatacaagtatatgaaggttaatatacaaataaactgaaaggctatacaaccctgcatggtagggtgactgtacgcctgcaacacaagaactcaaactgtgtatgtgtgtggaagtgcgaaacttaggccctaagaaatgttttatacccaaattcatcttatggtggttctcttaacactacactttttatctttttccaccaccaacaaataagtcttcaagtaagcatacctccaactcacttttcctttgaatcatacctctaactcattttttcttggaatatcatcttccagttgcactttactgattatcttacatttcatcaccaaaaagtatctcaaagaaaatctagttaagttgttgcctgatgaaaaacgaaataattaagaggcagtagtagcaaaacacattctaatatactgtattccaactaagcactgaaatactaggcctttgggaagagaagagatgggaaaaggactcagtgcagtcagtgagcccatggagtttttggaaaaagactgagagtattaatgcatcaatacagcaattctttaaatacaatggattttagaatgatgcttctcacttcagacagacactacagaagggaaatgccatcaagaacagtgagaacaagatgttaatcatgaaaaagggtctaccttgtttttctaaagacagacttgaaaaaggtaaatccaaagatactgtacttactattccgatctctacccgcacccccctcctgccaacgctacacaactctttccctctccttcacttccactccatgtctgatctcaacaggtgaggagtctacaatataagtcctatccacccagagttattttcagaattacacgtactcactaaaacttccccctacatagtaattttatgatgttccacataactaatttttgcctaagatgagactactttcaaaaatagggaaaggaaatttaaatctttatgtatatcaaaggaagtactagaaacagaacaaaaatttctcttttgtcttcatattatggtagaaacatagacaacaaacaccagccacctaaatataaattactcctgcaagactgatgaccaagtttattgaacgagaacgtcaagctcccaaaggaaacgcagaatgagatttaagagttcctacgacacactgttcccaagcatatactcattctgttcctctgcctgctgcaccctaccattctttcttcacctgactaaccctactcaacctttaagactgagctcaagggctcaactccagaagctttctctgaactcccaggtagtaaaagttccacctccctcagcatggcaacccactccagtattcttgcctggaaaatcccacggacggagcaacctcataggctacagtccatggggtcgcaaggagtcagacacaactgagcgacttcactttcactttcagtatactcacagcatcccttgaaaacatttaccttggtatttaccacatgtaaatacccctcagtatcagaggggaatgatccccaaatgctcaagtcacttatatattaataaaatggtatagtgtttgcatacagcttttgcacatcatcctcatcctcttgtatatttcaaatcatctttagattacttagaatacttaatccaacataaatactatgttgtctagttgctaaatcatgtctgactctttgtgaccctatgaactgtagcccaccaggctcccgtgttcatgggatttgccagccaagaatttctgagtgggctgccatttccttccccaagggatctttccgacccaagcactgaagctgtgtctcctgctcagcaggcaggcggactctttaccactgagccaccagggaagcccaaatgctatgtaaatagcttttaatacaatgtaaatactatgtacacagttgcttgtgcttggcaaattcacattttgctctctgaactttctgaaattccagccccccatattttccatccacagtcggctgtatctgccagtgcggaacccacaggtacagaggaccaactgtatattgaaatacctgtgcaacatcctcccccaggagaccactagcctcaagatcaaaattcagtttatttgcttttatattcttaaagcctagcactggcattcataagtattccataaatgttttgcaaaaatgaaacagaagcataaaaactctatttaaaacccgttatgtatattgcgcattcaaaaactgctgagacacgatccctatccaactatgtctaaccacagagacaattcacttatattaaaaaaaaaaaaagtctttacaaatttaagaaattgtatgtaccagatgactgaaagacatgaaatgctacaaaaagtcaatgactgcagaaatcaccagggtggacaagaaattttcatagagaaggtgaaacttgagagtggaggataatacctcctacaagtgaaatggctttgaagacagattaaagcaggagtggataaacgatgtttagaagacagtgagtagattactctggtttggggtggctgattcttttcaaaaagtaaggagataccatgtggcagagttagatgagggtcactttatggaaggccaggaatgctgaactaggagctgcagcaagggaaagccacatacaaatgcttttcaggaataacaacacagaagcaatgcaaaagattaactggcaaggggacaggtggtagggcctgaaggagaaccataatttagtaaacatacataaatctcctttttaaaaacactgaccacaattttatgagatcaatgtccagtttaaagacaaagaaatcaacacccagagatgctgttagttcaaaaacgggaagtagtgggcactgcttgaaaaaccgaagtcagcactttcttcttgctactttcaagaactgcaggcctaggtaatcaaatgaagactgtttcaagagtatgcatataaactgacagtgctggaaatgaagaaagaaagaaaagacaacaggaaggcaacattttccaaagtggattatgtgtggaagagggtgaggaaaactgggagaactcaaagatgactgccgcattttaaacctgaatgggaagatggggagtagcagcatgaatggcaaagaatgagaacgcatggggggttgggggaggaagggtaaggagcaagagtttatctttaagagtgttcagtttgctatgacagaaagacttctgaaatgaggaatggccagaaggcagcagcgaaaaattatcagattagtcagtgccgggggctaattttcaggcatcatacacagctaaaacttatatgcttactgtatgccagaactatcccaaacactttacacgtgaacccatttgacctttataactccaagggatagatgctgttaactatcctctcttttcagatgtggaaactgagatatagaaaacttcagcaggttgaccaaggcagcacagctctaagtggtagacccgtgctctgaaaacaggcagctgtgtcccagagaccacactcaaccactgtacccaactgctctttgttctgtattattttgcatttatgcctgttgcattagtttataagctctctgaatggcgggtgtggtctctttcaccaatctgtctccataggacataggagtatactaagtaggtgcttgataggttttaaacaatgatgacggaagacgcaaaagtactgcgatttctgaggggaaaaagaacgtaggaaacagaggagtagggctatgcctttcgttttgtcccaagtggggtgaggcggaccaggaaagtaaaataagaagtagggtaaccataatctcagcactaaaacccacggagctcaccaagtccccgtaaggccccagagtgtgcatcgtagtagctgtgaactatgtgggggtcacgtgctcacctgtgggtctggtgcgcgtgtgggcgaagtcgcttcagtcgcgtccggctctttgcagccttacgcactgcagcccaccaggctcctgaaccctgggactctcccagaaggagtactgcagtgggttgccgtgcctcctccaggcgtccttctcgacgcagggactgaagccacgcctctggcgtctcctgccctggcaggtgggttctttaccactagcgctacccaggaagcccctatgcggcctggtaaaactacttaggcgtatattctcatttcatcctccagagatctgggatatatcttggtccaaactgaatgtttactgatgggatggatggacggatatgagaagaacacagaaagactgaggaaaaggaaagcaaaagtctgagtgagtgagagaggagaacaaccaatggatgaatctggccattaggtctctggcacctttggaatggtcaaatccaacaaagtgctaaggaaaaatagctgtattacaagggactatggtaaagaagatggtaaataaaaggaaaaacatagtatacggcaaacttgaaattgttagattaaagaaaagccaaggacgggcagagcttaaagggaaaatgggaacaggcaagaacttttaagagaaagctgagtttggtccacaaaacagaaaactagtaaaggcagtgattaaaaagattaaaaggaggaacacagcacatccgaaataaggttctagagagagtaatacataatcaagaacagagtcaaggaaggaattctgcaggaccccactgccaaatggcttttcccttttcaagacctctaccagccaccaagtcttcagaactaacacttcacatatgtctaattctctgtccataacagaaaacttagaaaggcctggctagaattctgatgttatacattgaatgagttaataaaatttttaaaaatgtatttggaataaaggagacatgagatgttcttcttgcctgaaatgtcaatttaaccaataactacttttgaaagtcccaaccatatttaaaaacccagaccaaatctcaccttcttcgagataccttcctcatcccaactctattagaataaagttcctttcccttaaacttgcacagtacgtgtttatcaattcactcactaataacctttctctagtgtctttgaatttcccagaggcaaagcccatataattgtgatctgcacattagtattcactaattgccagtaaaataaaatacaatttttttaataaatacatttaaaacctgtacaggtttatataggtaaactctaaacatggtaactagcctattactaccgaaaaccaaactgctaagagaagccttagccttatttgtaacctgcagtttgaaggaggtgggaaaaaataaacctaagtcaatctgtacccacagggaacttttggcaatgtgctggaacatttctggttgtcaagaaaggggttgaatgatactggcatctagtggggagaggccaagggtgctgttgaacatcccacgatgcacagaattgctccccacaacaaggaattacctacagtacaaaccctgagcagaactgttacctagtctactggagaatcataacgtttttcttaacatagtcacctacacttaaaaaccgggcctcagggaaggtgaaaacaacctgtcactctgcttacttgttaacaagaaaggagctggttacttctcccttaccgtgtgacatgttggcgaaaatgccaccatggtatttttctgtaaccgttgattaagtccttctaagttgtaacttctcaggccattgacaagtctattcacaacaattcaaatacagctcgattacaaaatttaaatggcaatgtgtgataaccacctgccaaaatacccacatacagatgaacaatccactgttcagaagacatttgcttaacagtctattctctgaaaaagatcagttaaacaaacccacctaaactttcaggtacttattcatgccaccagtaacaaaaatctgaaaggctagccagggttagagatgtagttgtgggctgcaaatggtatttctccaccatacaacaaaacagcccttgttaagtctgaactctcatgcatcacaaaactgcctcatgacaaacgtgctacactagagggtccagatcctaacataacacatcttaaaatacaaaacaaagactcagcaagtgcttcatcgaccatgaagataaaacagagcagctgttagaaagcaatcaaacacaggatggaacaggaactatacattttgagtccaactgaaaccacaagtgaagcagaaattaactgctaaaataatttagccagttaatacccaagtaggtaaaatgctgttagcactactccatcaaaaaagaaactaataagccacaagagagggtaatttttttcaaacaatttcaccacatttggtaaatcagccacatttggctgtatttctgggaccaatgctattttaaatcttcagcatgagagtggggaggtgagtgaatgggtaaggagaagacttcttgaccatatgaattagcatcagtacatgctagaggacttcttgagccttccaaaacagtgaatatccagtcctgcattaccagattcttccagaatctggagcccaccctatttagtattcatatttcccccaaatgatcccatgacctagttctcctctccaggctagaaaaagactctgcttgctactttatccagtctcatcccttccctttatctctctctgtctcaaggtttaaagtgacaaagttgatcttacaacatactggatgtttaattagtatttaaatgacactcatttttctgctatctcagaaaaaaaccttgtggctgctgtagatctctccttctggtaacaaagtttctgacaaagaatatgctactggaatgcacctctccacccacaggagtattattcagaaaacttctacaaaacaggtaagttgtagttctttcctgtgaagtggtctaacaccagggatcaacttcaagtggatcccactggaaaaccttcagcataacaagaaattaaagacaaaaaaataaaaaaggagactactgaaggaaagacggagaggagtatgaacagttgcctcccacaaccatgtagctgtcattcaggagcatcagcagccaccttttacaaccagatttgacctaatattccctatggctatgattattctatgtactcatcttccaaaacaacttcaatgatgtccttcctgtctggtactttaatacttacccagctccatttttccaaccttgacatgttaatttccgtatttctattctttcaaagcatgatattatacctcacctactgtctcctctatggcctattcccacccttgcctacccttctcaaatgaactatattcaatacacctttttcttttattcaacaaagatggcaaagtctttaaaaatctttccattttgtcataaaccaaaaaagaaaacactgaattctttgagattaaatttccagtgttttcagtctaaaagccccatatttaagaccattgatttttataaaatataaaaatgtattctcaacttaatcatttggataggactctaatcggtctattttaaaaagtgatactcccttccccttttaccaataaaagagtcatcattctgtcttgcccagaacatcacccatacagaggataggcttatctttcctttcatctgctcactatttctacaactcaagactaattcagtccctgtgatgctgacttccctctctttgtcatactgaggcttcttacctcatatcctcacttctcactctttcgaaactgccaccttatcccatgatttgccactaccccaccatttcaacaccagctcatttactctgacaaattaactcagctgagacagagctaattttcacctacatgaggaagatctgtagctgtctaaagactgcccagtcatggtcttacaccactgacaaaggtagacaacaacactcttcctaaaacgaaagtcacaaagaataactgctatacccacaaccacactcattcagcatcctccccaagttgtctataaaaaccaatggttccatattcatcaaaggaaagaaagtgaacataatgcttccctgaagacattctctagactctcacagcagattttatttttaatttttaatacaatgtttaaaggttactgcccatttacagtaattataaaatactggctacatttcccgtgttgtgcaatacatctttgagtctctcttacacccaatagttcatacctcccactcttccacccctatactgcatcccactccatccccactggtaaccactagttaccagcacacttcaaatggagtgagtatctaaagaagagaaagaaggaaatcctggctggtgcatgtcttattttatcacctcatcccatttctgtcgactactggccctaagatttgcttttatttacttaagacaaatgagcaagactgagaaaagattggctttcaggaatctttatgtgatttcaggtcctacacctattcaattttgcctgttcaactttagctgggaaatttaggctatttaaacatgtgttcactcttatgcttttcttccttctttaaaaaactaaattcactgccaggtgtctactactgattccacaacccaaggataagtcttccttaccatgctaactttaaaaacacaagatacattaacatagaagcctctcaaagccaactgatcttcccattaaaaataccaccatggaacttccttggtggtccagaggctaagactccaagctcccactgcagggtgcctgggttagaaggctggtcagggaacaagatcgcaacaaagaccaagcgcagccaaataaataaatatttttaaaaactgggcttttcaatcatcattcatcatcatttaaaaaaaataccaccactctcctgatctgcttttcaccatacctttctagtctcactgacaccaccttatttctggtccttaactgcccaccacacagatacaccttcccaatacaaagctacgaacatgtgatttcccttctaaacaaaccgtctcagtctccactgtccactcattttaatgatacactacaggtcaaagtattcaagattttttctctgtgggcacttaatcaaatagactttcccttaccaccctgtctatataaaacagcacatccctgtcttactttatttttcttgctagtacttatcaccatgtgatgaacacatttatctgttcctatgtttatttgttgcatccttccatcagaaaatactttcccatgttcactgttatcattcaccactgaatcctcagtgccgagaatacagcaacctctcaagacatatctgtggaaagaatgggtgaattcagacatgctgcacacagcatagctggtctggagtcagaagacctgtatttgagttttagcttccacaaaccaattatatgagcctcaataattttaactttggggggctatgctctcttcatctgtaaaaagaaggggtcaaacaatctatgaaactgttaagtttttcctgctgcatcaccttatacttgtgtttacctggactgaatacttcccccagagcccaatcctcctttctatatatctctgctcagtttccttcatatggattcctcctgcacaatccacaattctcagaatactgtttatccttaaggtccaattttaagtgctgttttctccttgaatcctagcaaactgcaaactctctaagaggagggtggagttttatactcttagtagttagtacaatgcctcccatataggttatcaccaaaatgactgatgaatcatgtgtatgaatgaggaaataaacaaaggaagcttttcctgattcaccccaattgctcgcatactctgcctttggactcatgacacttggtatcttttatgatccttaccatagtttacttgactaatatatactaacctgcaaattccttaaaattaaggactgtcctgacagtttccatatctctcctctacagcatctatcatacatcttcaccacggttgtatttattaagcttatctgatatgttaaacaacaaagggataataaaggagaaaaaggaccttgaaatacccctataattccacctacctaccatgcagtcattgggcatacatgctgtcagttaaacgcaggcattccaccatacttgaaagatctcatccttctctacacactctgcttaataaaacgattactactttcaaaagcagaatagctaccctcatgtagcacttaactacaaaccttttcttgcagggatccactcacacaccaatactttcacttcactaaatggctaaaatgacttttctgctcatttcagactactacccccatccaattccctcctccacaaggtatgaaaccactttttaaatcattttaccataagcttgccattcttagttttgctactaaaagaccaaaagacctgtttcagggtctcccttccccttttctaagcagtggcaactccccacttaagtcttaggatcttaacaatctcattttcctgtgctatcaggatcttgacccccgtttatctctaccttcaagctcttattctgcttccatggaaccttccaagctgcacaatagctggtgcaatacgctctcgccaccatgtacttggttccaatctgcattttccttctccagtgtgtattaatcgcccccttaacctcccctgatacacatcacacactctcaactgcacccatgcgtcactctacctcgacatacaagttctttacaccactcttaatggatctacacgactctccgaatggtatcttccgacggattctaacccaatttcttctgggggatccaaccccggctgtagtacctccctttttcttcacttcctcatccattcccttctttttgccccctaccctcaccccaccaactaactacagatgacattatttctcagtacttccaaccccacaacgatgaaccaactccagtttccggcggcgtccccctcctctaggcctccccccacaccccaggtgtgcagacttccacctggccttctccccagccatcgctccagccccacaaccacaccacgtttccccgccgcagggatcagactcctccacacccacctctattcggggtcgccgccgcctccccgggcgcctccccgccccgactcgccagcgagccccgggcgcgcgcgcacacacacacgttctcacgcttccctaacctccttccccgcaccgagaccagccagctccgcgggaactcagcccggcccgcggagggggataggtacccaagtgtgtgcccgctccgccccctcccgccgagcctctcgcagcccccgcctcccaaccgggaaaagagaggacacagcaactcccccgccaccccggacgtaccacctctgtgtctgttgctccgtgcccccaaccttcggcccactccccagctccgtactgggccggcccccacactcaccggagatactgcgcgctctgcaggctcatcctccgccgccgcgtcttcccgcgaagcctctgcgcgtctctcaggctcctcggagcggccccgcggcaccacgggtgctggcggccgccgccatcttcctctcctccggctcctcctcgctcggcgggggggtgggggtgagtgaggcgaggggggagggagcggggaaagctgctctcgctgctgctccggcccttggggcgcagggacactccgacccgggaaggggggagggaaagggagaagggatgggggcgggggaaagagggacagcagaggaaggaagtgggggggggtctctcgcgagatttcagcggcgccggtccctccgggtgatttccgcctctctgtagcgctccctcttgggatcagttagccgtgcggcgcctgtgcggttgctgaatggcccagtggaggcgcttggcggcttccggccaacccaccccgctcctcccgcgcgagggggcaaccccagcctcaccgggaacatcgagcccgaatcaatcgggagttacactcaaagtcttcccccgtctttccactccgtccgatttcgctcttccttttttcctttcctccactcttcccgaccggaaacgccgcctcttcctcttacagttccggcccccagtccctcgtctccggtccgccctcgcgccctaaagtgacgctaaggaccccctcctcttttctggggcccctccctctgcacgcagggatacagttggaggggttagggtggagcccagggatggagagaaaagaaaccaatcggattggataagcaactgccaaggcaactggaggctgtagctgcattgtcatagtaaccaatgggtgcaggctgaatgaccctcccttggcttagtggattccccgaaaagtgcctagggtttcccctcggcttcccttccatcttaaaggcctcccccaggttgggaatcgggtagttctccagagcagtgaggttcattttctcctccctttccctctcccgcagcgatgggggagatcccgaggcattcaccatgggcttttccacccgcctgcgggcgggaaccgcctccatagttttcctctccttgacggacgcgg

SEQ ID NO: 245 - DNA, 151788 bp, Hippotragus leucophaeus
  source 1..151788: mol_type = genomic DNA
tatgggtacagctgatacgcctgtagagcttctactacccgtcgcgcaccccagtagagaactcgctgaggactggtaaggacaaaggaaagtttctggcaaagttgagaaggacagggacagagcagggagcagtttcagatcatatttaagccacagacagtggagaaagaagaacatcccccggctgctcttaggtcgccgcagggccagggaaatgcgagaaggaagtttttctcctggacctctgcctccttatccccgagacgcgcgaagtccgccgcgccatccgtcgaagcctcggcctctgccgctccaccccagggccgaccgaccccggcgtgcggcagaagataagcggtcgcctcgagcgctcgcgcccgctcccgggctggccccgcgctggggcctgtctgccctccgggcggccccaactcagccactgggctctaccccggggccctggccactagcgctgagctggtctccggccgcccgcctccgtttccccgcgcgccggcgctatggcgacagtcacgagactccggcggcccctgcgcccgccaatgggagcgcacgtcgcagggagacgcggacgtcgctcttccaagatggcggcgcgtccgtcgcgagcagccgggcaggggggaagccagcgaagccgagtaaagccgccgcccgggagaggacagaaggagctgttgccgccgctggcggcggctcaggcagttttcgctgctgctacggctgttgccatgcggcgaggctagggaggagctcacttccccggggtgtaataatgttaacagaggtaagcggcgacggcggccagtgtttacctgtgaaatggggaaggggccggcgctggccggtcagataacatcatttcagccgctggcgggcccgccctttgggagcgggcccccggggccgagcagcagcggggatcctacaagtgccccttgaagaggagcggtgctgactcaacagtcccaccgcctccggctcgcctgtgcctctggtttcgcggttgccactcgcccgccgcccctggcactggtctccctcctgctgtcgctgcctccggactcgccgctcccttcgtggcgtccccttgcgcgttgcccggtggccgcgtcggtctccctgcgttcgtgctggtccctgttgccctacggtttgccccgggtgtctcccttctcgtgtcgctggcctctgggcccctccgcttcccaactcggtcagcatcctgggtttgtcactcggccagtctggctggtttcccaccccccacctggactacttggtgaagaggacctctttgtctaagacacttgggtggcccggttacattaacgccctatcgcacacccctcacctttcgcttaaatcgtgggaatcagaaagttgagtgtagcatctgtcctcttgatttgcttaaggctcccttggtactttcagtggaacagttttgtgtgttttttttttttttcctccttggtcctgaaatggaagtagggcaagtgtgacgagccaatcagtttcccttttctgttgtctgatgtccattgcaaaaagtagactttttgaagaagcagtttgccttccgtagcagtactttaaggggaagaacaaaattgatgtttaactaggtacttgaccttatagttaggtgttgtggtgtatgctcttgggtggcattgaagataaattctgaggcttgtggatttgaggaaatgtcttagaagctactcacttgaagtcctgtgaaaattccagtgtcagctgtcagggactagtttgggcatctttgtgggctgaactaaggataggaagaaattttaatgggcagtgggaagtattcctacttggactgatagagaggaatgtgtgtagatgagtagcttttgttgtgtgaaaacatggtaatagaggacctgtcctattttattgactctgaggaacttcatactttggtatttgtacttgataatgtgtacagagcctggcatatgatgtgcctggtcaatccttattggttgattttagctcatgaactacttatttctagtagtttgtagttcattttgtatttctatatcccacagattttttttttttcacttcagtagttaattttatttccggagattatggtacatcataagcttctgttgtcattagcagtgttaggtttgaaaaaaagataagtatcagaagttttatttttacctgtagtgtgatattttgtgggaaagattagccttataatttttcagtgctgttcataatatacagtattttatgagatgatcttttgattaaatttggcttagtttagcagccattgaagagttgtaatgctttcacatgaactcagtgctactagtaaaatggggaagactgaattttctaagcatctgtgttttattgtttaaattattttttggccatgctacatggcttgtaggatctcagttctctgacctgggattgaacctgggccatgggcaatgaagcctgaaatcctaaccccgaggccaccggggaattcccctaagcttcccagttttaaaataatttcatgttgcagtgacatattttcaatagtaagtcagtcattgtagttagaggtgctttagttgtgtgtgtgtgtgtgtgtgtgtttagttagatgtgcttaagttgtgtgtgtgtgtgtgtgtgtaacacgtttgtgtgtacacgtacgtgtgtgtgctgcacttagcttttaagagtcagagccagagttccaaccttggctatctctgctgagtccactgttaacaactaccctggattgtttctccaaagtaaggcccagattaaatgctacttggatcttatctatgtctgtgagtaatcattttatagattagaaaactgaagcccagagacttgtccaaggccaaattattattagtggcagaggtgaaactggaatcccatctcctgactaggtacagaactctgaccatgttgctccctatgagtaattttcagctctcttcatagattttaaaacatactgctgctttgtttgaatattgtagtagataagctgaaaattattattacttgagaaagacttttttgcttgaccgtaggtttttttggaccacattcagaaatagtcctgttttgaaatattttggatataaaatgatactcagtattgatttactaaaattgtagtgtgagatttcttcttagtgcttctcgtagtgctgacttagatatcagcatgtttgggggctgtgatttgttttatgtgagatctcagaatgtataatgatgagctctgttcagcgagtgtatactgtgcccagaaagtggtgaatcatacagtctgcttagttctttcacatcacaagattggggcgggtgatagccccattagccagataagaagactgaggttgagaattaaaatagcttgcttaaaaattatacaactggttgagtcagtaatcacacctaggaactcattccaaattgtttgttgtttctgtggctcagtatggaatgcatcattaatcttttttttttttgtggctcataatcatcagtacactgttttcagtttggttgtttttttttaaactgaggtgcggatgtgaaaaatatagctacttaatgtagcattcatatcaaatgagaataaacattcatgtgaaacttttcacttttgcattttgtcagactaggtctttgaacctttgcagaagtgagaaaccatgcaagtgttcaatgaagggctacattaaattaagctgaaaggaaaattttctccagttgagcaaattcatttgtatacactgaactcagaaacctgtgagatatgatagattagtgtgaattgaaagtagagcgccagtggatcattatgctgttttttctttttttaatgtaaagagaagttattaacatagttctcagtttaagttttttgactttgttttgttttcattctaaatactgttgaagtatttagaagactcgctagttatatttgtgtatttgtgtcctttgcattccatatatggatgagaggattttttttttcaacttgatgtccatttaactttttttcaggacttcttaattttaatgttcctcctataacatttgtccaataatttgtaaatactatacttgaaaattgtttgtttaaagctcacttacttatcctctgtgtgcgtgctaagtcgcttcagtcatgtccgactctgtgaccccatggactgtagcccatcaggatcctctgtctgtggggattctccaggcaagattcctggactggcttccatgccctcctccaggggatcttccctaaccaggaattgaactcccatttcttctgtctacctgcattgttagcacaacctgggaaatgccactctttttacaataggagtgaatttcaacatatcagacttagggcatgggtaagtgagtagttactccaaaatcactgcagatggtgattgcagccatgaaaataaaagatgcttactctttggaaggaaagttatgaccaacctagacagcatattcaaaagcagagatactactttgccgactaaggtccgtctagtcaaggctatggtttttccagtggtcatgtatggatgtgagagttggactgtgaagaaagctgagtgccgaggaattgatgcttttgaactgtggtgttggagaagactcttgagagtcccttggactgcaaggagatccagccagtccatcctaaaggagaccggtcctgggtgttcattggaaggactgatgctaaagctgaaactccagtactttggccacgtcatgtgaagagttgactcattggaaaagaccctgatgctgggagggattgggggcaggaggagaaggggacaacagaggatgagatggctggatggtatcactgactcgatgcacgtgagtctgagtgaactccgatagttggtgatggacagggaggcctggcgtgctgcgattcatggggtcgcaaagagtctgacacgactgagtgactgaattgaactgaactgaaaggtatagaagatgtaggacagtgtgctgaatttggtccagtgctatggcatactctggaggttatctttgcatgagaaccaatcagcagtctgttgacatgcgtgtttttaaaaatagcgaataaaaattgtagttatttaaagttagtagttgtttgggttgtgtgtaaatcagggcataatggcacccccctccagtcctcttgcctgggaaatcccctggacggaggagcctggtaggctgcagtccatggggtcgctaagagtcaggcacgactgtgtgacttcactttgacttttcactttcatgcattggagaaggaaatggcaacccactccagtattcttgcctggagaatcccagggatgggggagcctagtgggctgccctctctggcgtcgcacagagttggacacgactgaagtgacttaccagcagcagcagcagtaaatgttacttacaggtgtgctaagtaagttccatccagatttattgatttttttgtatattaatgctaattcttgattttgtggttaacaaatatgtacagatgggtaaggcataagctgctgctctttcagaagtcccaggttaatagttgttaagggagtacaattttgtgattcaagtatgtttggaagatttgcctacagaaaattaaataggacttcttatagcttttgataggtgatttactctcagagaaattgttagaatttgtgtcaagttgcttacagactgtgagagttaattttatgagttaattttatgtgtcgaccggccttggagtgtcacattaaactgtatttccgggtatagtggtgaggatataactggatgaggacaagattagcatttgaagtggtggacttcttagagtagatcgctctctgcagtgtgggtgggcagtgtccagtctgttgagggcctgaggaagacaatgggaagaaggaatttgccccttttttctgcttcactgtttgagtgccagctcaaatgtgccatttcatcttctacccttgggccatgctttataccatcagcttccctgattctcaggcctttgggctgaattacacctctggctctcctgtccttccagcttgcagaaggcagatggtgggacttctcagcttccataagcttgtgagccagtccctcataataaatctcttaaaaaaaatttccgttggttctgtttctctggagaaccctgtcttaatataaagacttgaaagagtctgttgtattttgctatgggaaaccctgaggtgtgatgagtcgtgcatcaggggagatctttggacttgcagagctctttttaaaagacacactcacatacgctcttgctcatagggagtgcttaaggcaaaatcatgacttgactttgtggattaatatatttgttcagagacatacacttgtggtggattattccttaagcgatgtgatctatttctttaattattaattaatgacattttaaaggctactaaccagaacaagaaccataggcccattgaccttcaaagaatgttaagaggtgggaaagagattttacaagggaagtataaggacatcactgtctaaaatgaggccaccttgtcactctacatatgactttgtttaggatcttctgacaaacgaagttgaatattgtaagccatttctcaagaattctaaaggacctatgtttcatttttttaccccattgattccagattttcagagagcttatacataaattattcttacttcatatttattttcattatattttattactgtagcacacatatacccatttttcatcacttttgattaacagctagctaactcattgatagaattgcaaacaaaagcaaatatgtttgaatttttttagttaaaccctataactttatattaggtaagtcttgcttttccatttggcacttcagaatattaaaaaagaggttttagatttccataaccatccttggatgtcctgggtttgaagatcctaatgttcagatggattgttccaaagttttttttgaccactgtttcacaagaattgggcttccctggtggctcaaatggttaagaatctgcctgcagtgtgggagatctgggtttgatccctgggtcagaaagatcccctggagaagggaatggcaaacccactccagtattcttgcctggagaattccatggacagaggggcctggcaggctatagtctatggggttgcaaagagtcagatacgactgagcaactaacacttttactttcaccaaaattgatataaaaaagtttcttaactagtccactgtgtttaaaagttctgcactaattgccacaagtttataaaattattttatttgaggaaatatggaattaaatttggaagaactgagtacaaatgtttgtagtttaaaagataacaaggcattggtttgtgaatagtaaggccacacttcagaaatggctcttcgtttctgtgtgcagtaactagcagcacatatacagagctttgcagattgtaaaaggtgctttatctcttaatcatcaccttgttagatgtgcttatgtttatgttcagtgtcatttctagtttatctatggaatagagtatgcttaaagagaggaaaaaaggctatgagaggatgtttgaaatagattgttttaggtgggatccaagtaagctttgttagctgactaatagtggaaaaggagagagtgagcttctggaagacgaagaaaacaggttctatcacggttgagagtttctgatgctggccactcactaactagctgtttgatggcaaagctgtgacttgatggcgttcctgtgtgaggttcaaggctgtgactttttaaactgtgttttgaaattttgtggtttcggagaccaagtgccccctcaattgatggtactttaacattgactttccatttttgaatcaagtggacagctctgttttatcatgttaaaaatggttcaaatttgaataataggttggagtcatggtgttggatactttgtctgttagcaacctcaatagtgaggctacccaagtatgacctatatgttaagcgttacagggatgagtgttagcttcatgatttatttatgatgtgacactgggaaagttgtttgaactctgagtcttagtttccttctatgtaaaacagagatgataacaccttcctagttactctcatattgttctgaaaattgaataaatggtagagtaaaactctttgtaaactcaatcattatacaaatattagtggttaatatataattttttttcctctctgcacttacatgaattcaaaccctaggctccatctagctttatagcttactaacttctcagtgggtgggtggatcccaggagaaaagagggtgtcctctggctattggtacagtaacagggaagtcagggattagaccgaaagaagggaaagaaaaaagagaatagactgacagcaggtcttggcagctagtgatgaggatagtttcttgtgtggttggtaaacattccaaagaattctgcaagggaagttccaaaaaatattttggaaaaggttgcttatttgggggctcatagtcatttgtgtgtacacattatgaaatatttgtggcaaaagaattcttttatttttaaacaacccctggtaagttctaaaaaggaaaagctgtgtacagtgtttaaaaagctttgatagtaacttgtcctgaagattactttttgtgggtcactttgtttaccaaacgtacatacccctactgtgtggtaggcatatgctgcccacagcacagttctggtgctgaagttgcctctgacctgaaacctcctctcagaaaattcaccatcagagctcatgttggcagtttggccatcattcagctgaggccttgaggtgttttttttttttttttgtcagaataaaacataatataactaaaaggtgaaaaattcagagaaataagagtttggagaatttgtaattaacaggtaattacttgctttttttttttctttttctttttttttttttaataactccaggtgaaactaccagtttggatgagatggcagttctaaaatgaactgcttcttacaagtgaagaattgacccatttctactgtctctgtttgctccaagctaattcacagaagtgaaaaaaaaaattggtgaatttgtctttttttgtttgctttgtttctctgaaaaaagctctttatcactccttaggaggtctaccaaattatactgaaagacctggctgaattccattaccttggtaaaagtaatacttggtccctaccctcatacattacatattcacgtgaactcccgaatatgtggtttactgttgtgttcccagtgtctggaacagagcttaacacttagtcctcactaaatagctgtcgaataaaagaatgttgaatatcccctcccataaaatgaacggaaattgaaaaattactaggacaaaaattgtctttgataaatttaaactatcacattaattaccctttaaagactggttggtgtctaactccataaggagtttttaaatagtacactgtggttgaaattatgtttgtgatcacaaaacacacaaaagtttgaccaaaaaaaaaaatagctaacatcaggcatttagttagaatgtaattctgttttaatttttcctgcagggaaaaatatgattaggttggtgtaatctttgcttttatgtagtaaattataaatgcaagaacaacttggattctattttatacctcttgctgctttatttttatggtttcatttgtattccagaactaggtaaacttaaagctttgtttctaatagcacggtaacgcacatctttgtgtgctctgtggagtgtttcatgtttgtatgacctttaatgctgtcttgaaatctgcaggagtaaaatttggtcatgaatttcaaaaatttggaaatttggggagtacattttctaggagggcagctgctaccatgatctcttacctaaaatatctctccatgtcactcttactgtttgctcatttcactcatctctgtttccattgtatattcagaaataacatgtaccagaaaagtttgacaatataatctgctatgttcagtggtgaaaattaaactggcttaatagtctttcagttagtaccagaggctcatatacagtctggaataattcagcattgttagattattgcaccattttctccagtttcctgaggaacttttaattctgatgcagccaggagactcctaaggtgaatcctgctttgctttcgaccttagcccggcattattggagagcctttttgagtgttactcccgtttaaacctgacttgctggaaccctggagttatttttagcctggctgtggcctggcacgtgagagagtatgtgattctttgtattgtgacatcttttattttcaggctagtgttgtgtgacaacaggacgtgtatggagaatggctcttggattcactgtcatttgaggcttggaatttataaaactggttgaagttgtacagttttcatggaagagtagagtctgaaataaaatttcacctccgtttaattttacctcagtttggggaaataatggtctgattttaagatactctgatactatgtattaccagtgtttctccaagtcatggtataccttagaatttgttcttgatttcccttcctgagattatttggggtggcattttttttcaccctcagaattttcctcagggtgttaattagattgcaactattaatataaccagctactttaatgtctagtgttaattgctaatatctgatgcttttttcttgtgtactacctgagtgctcaacacttaaactgttgcagtggtctaatcctggtaagagttagcagaataagaggaaatgggctagagggagggtggagacaacttgaaatgtatagtacaacaaaggtacagaaaaagaaactgaaatgataggctgtacaaataatgggtatattaattatataaaaattttagaaaagttgattaggcttaagagtattttatataaaaaatgttttttgaaccaagttctacaagttaatatctgatagctcataatattcagtcaaatactaagcactaatgtaaaatttataggactgcagaagttagtgagttatctttctgccggaactcaaaaagagtgttatcatctatgtctttatctcttctaaacacagattgaacattcttacattcttaatttctgaagaagagtatatgcttttggttaagactgacagtaggtgtcagattatttggatatgaatctgtaagttttatcagtttggagtattttgaccttagaaagttattaacctttatgaacctcagttttctcatcggtgtaacttttaaattaatgatctttagcccatagggttgttttcagtattaagtgaaatagcatgttaagtactgcacacggtatttcccacagtaacacccaagaaatatctagcttttattattatttcctcagaagtaaataacaggtggtttatttatttaaaccacttgtttaaaatttgtttgaagttgttttttgtatttttgtctttgtttcattggataagttttaaaatgtcagatcaaataaagtaattcccttttgacccagatgatctaattcttcccttactttctcagtttttattaactttctaatgtatggccaacctagatagcatattcaaaagcagagacattactttgccgactaaggtccgtctagtcaaggctatggtttttcctgtggtcgtgtatggatgtgagagttggactgtgaagaaggctgagcgccgaagaattgatgcttttgagctgtggtgttggagaagactcttgagagtcccttggactgcgaggagatccaaccagtccattctgaaggagatcagccctgggatttctttggaaggaatgatgctaaagctgaaactccagtactttggccacctcatgtgaagagttgactcattggaaaagactctgatgctgggagggattgggggcaggaggagaaggggacgacggaggatgagatgactggatggcatcactgactcgatggacgtgagtctgagtgaactccgggagttggtgatggacagggaggcctggcgtgctgcgattcatgaggttgcaaagagtcggacacgactgagtgactgaactgaactgaactgaagtgaatgtatgtattgcactagggctaaatttagactatatcaggaggacatcaagagaggtgacacttgtataccattgccataactagaacttttcactgaccaataatttcttctggccattaacgcttttactatagatgaagtgaaaggaaaaagttgtagtattctcatgttatgctttaaaaagtgtcagcattgtgtagttttctgctatgggaaatactatgattcttgtcaatgtaatcaagttttatgtaaagtaactcagaatttatataagcttttctcttgaattgttcctttatagagaatagaaaaagatgaggagtgttaaaatcctttgtttaaaagaaaatatgtagttagcattcagtactgtatagtaggttaagaaaaggactttcatttgtaaattattaattgtactgtacatctaaatatgggtattaacataaataattgcaattcctttattcagcagctccttatctgcattcctgtaatagtacagtaaattgacatattcgaggagaggagtgttcatgtgataataatgtttacttagttgaagattgtgccatcaaggtcttctgtgggtgaatctgtgcctgtctctattttccttactatagttattttttcctccttgtcgtttttgctttgtggatatgttgattttcccccctcatctctgtcttgtattattctcttccgtgtctgtagttctgcagcttcctttctcagttttttcccttgaccttcacccttttctgtccctctgaagtaaatttaacaggccacaataaagagttcagcttttatttttttaagttatattccacttaataggtttaaaaatattttccattgctaatttaaaaggcaaatgtacacacagtttatatatatattttaaataatacaactcagtatagcttcttttgtgttgtatgccttcttatctgaatttattgattaaaaagcctcataatctcagagttaatgagtgatgttgagctttattttttatgtgaatcaagaatatcttgtagtactttcaagatcattgttttgttgcgttgttactgtacagccttcaggaacatgaaggaaatttttctgaacttgtgtcaactctagaatataccttggaaagttatctgaatagtaataactacaaaatctacatcagattcttaaggagtaccaaggactttaagatatatcagttcagtcacttcgggtttttctgataaatagaatttttaaatcttaataaatccctttcatttgattccttaggtacgtgtgcagaattttgcccagcacctccacatcattaaaaaaataaaaacaaacctacttgagagccagtgtgaaatcatggttcgggacatgcttgaactttaaaccaagccttagttcatggtctgcttctgtgtcttaagctgttcttcatctatagattagagttagtaatatagcatgtcacagagttgttggagaattagaaatatatgtaaagtggttagcaaagcactaagcagtaaatactgagcactcctttaaaataggatgcttcttttcataagaaggcaaaggagaagtaggaggttggtgacagttcagtattaggctgtgctttgaacatcttaactactgtgactttccctttcgttatctattatggggaaaagcagaagttgaattgtcaatattgggactttttatttttgtattgttaaagtcttacatgaatgaggcaaagggacacttatgaatattgcctgttttattttatattctaatagttaactgccgtggtaaaagttttgtgtactttagtagagaacagtttggcagtcttctgatgtattagctaaattcattctttctaacttacttttgtaagaggagcttaaggtaatttgctgtgtgattgagtttattttcccacaagccgtatgggaagattctagtttctttacattctcaagaatatttattattatctgtatctcagtagtgattttgatttgcatttccctaatgtctagtagagtttccctgctggctcaatggtaaagaatccacctgccaaagcaggagacgtgggtttgatccttgggtcaggaagatctctggagaagaaatggcaacccactcaagtatccttcctggagaatcctatggacagaggagccttgtgggctacagtccatgtggtcgcgaaacagttaaatacgacttagtgactaaacaacagcaagcatgttctgagtctctgggtcttgactgtgcagatccctaactaggctggcttattctttgagcagcactccacgtcaggagttgcagctcagtcgtgattgtcttgaggatcgtttctgactgtggtccagctgcctcttcacagtgcttgcagcagtgtgtctgccctcatcacctccaccttgttattcttatacttattaatgttttaaaatttttatttactacgtaagtaaaccttgacaatatacaatatacaaattagttcagttcagtcactcagttgtgtttgactctgcgaccccatggattacagcacgccagccttccctgtccttcagtatcttccagagcttactcagattcatgtccattgagtcattgatgccatccaaccatcccatcctctgtcgtccccttctcctcctgccttctatatttcccagcatcagggtcttttccagtgagttgagtcttcccatcaggtggtcaaagtattggagcttcagccttagcatcagtccttcccgtgaatattcagaactgatttcccttaggagtgactggtttgatctccttgcagtccaagggactctcaacagtcttttccaaaaccacagttcaaaagcatcaattcttcagcactcgaactttctttatagtccaactttcacatccatacatgactactggaaaaaccgtagctttgactagagggtcctttgttggcaaagtaatatatctgttttttaatttgctgtctaggttggtcatagctttccttccaagaagcaagcgtcttttaatttcatggctgcagttatcatctgcaatgactttgaagcacaagaaaataaagtttgttcctgtttccattgtttccccatctatttgccatgaagtgatgggaccagatgccatgatcttagttttctgaatgttgagttttaagccaatttttcactctcctctttcactttcatcaagagactctaattcctctttgctttttgccataagagtggtgtcatctgtgtatccgaggttattgacatttctaccagcagtcttgattccagcctatgattcatccagcctggcgtttcacatgacctactctacacgaactaaatgccttgatgtactcctttcccagttttgaaccagtctgttgttccgtgtccagttccagctgttgcttcttgacctgcatccagacttctcaggaggcacattaggtgatctgcagttcccatttcttgaagaattttccatagcttgttgtgatcctcacagtcaaaggctttagcatagtcagtgaagcagaagtagatgtttttctggaactctcttgcttctgtgatccaggagatgttggccatttgatctctggttcttctgccttttctaaatccatcttgaacatctggaagttcttgtttcacgtactattgaagcctagcttggagaattttgaacattactttgctagcgtatgagatgagtgcagttgtgtcgtagttggaacattctttggcattgccgttctttgagattggaatgaaaattgaccttttccagtcctgtagccactgctgaatttccaaatttgctggtatattgagggaagcacttttacagcatcatcttttagaattttaaatagctcagctggaattccatcacctccactatctttatttatagtaatgcttcccaagccccacttgacttagtactccaggatgtctggctctaggtcagtgatcacaccattgtggttatctaggtgattaagtggagaaggcaatggcgccccactccagtactcttgcctggaaaatcccatggacagaggagcttggtaggctgcagtccatggggtcgcgaagagtcagacacaactgaagtgacttagcagcagcagcaggtcattaagtatccgtttttgagatttttttccatagcacgttcatcttgaaagttctgtattgagctgttcccttattctcaccatagtctgactgactgctcatcttaaaggttctgtattgagctgttcccctattctcaccatagtctgactgactgctcatctcgaaggttctgtattgagctgttcccctgttatcaccgtagtctgactgactgttcatcttgaaggttctgtattgagctgttcctctattctcaccgtagtctgaccgactgctcatcttgaaggttctgtattgagctgttcctctattctcactgtagtctgactgactgctcatcttgaaggttctgtattgagctgttcccctattctcactgtagtctgaccgactgctcatcttgaaggttctgtattgagctgttcccctattctcaccatagtctgactgactgctcatcttgaaggttctgtattgagctgttcctctattctcaccgtagtctgactgctcatcttgaaggttctgtattgagctgttcccctattctcactgtagtctgaccgactgctcgctgtgctttctcaagcaagtcatcagtgtcgtgtttctcacgtggtggaatacaggttctatgatcatgatcattgcttgatagaaataaacacccatagtagtgttgccccttaaatattttaaatgaccgttgattgaatgtgaataaaatgagttaaggatatggtgtgtcttttgtaggaaaagtgatatgtgtagtttaaaaataataaagtattatttgcaatatacatatattaaaaaagttcatgcagcttgaaaagtaaagcattttagaagaatgtttagtaaaaagtgaaagtattgtttgctttctctgttttaagaacagtctgggaatgaacttacacatgggagaatatttaaaaatttactcttaaaggtgacagtgtaaattatcttttcctgcttttataagcttctgaagtgtttgtctgctttttccagtagagtttattttttgttgcactttttactcctgtcttctcttccctttccctatagagagtagttgctcaccgaattgatttgacacaaaaaccaagggcaagttacatctaagtgttaagatgccagttaatgataagaaaagaaggtagtctggtggagattatcactaggaagaaaatattgatgtgttataacactgatgtagatgactagtgagaagatctgtgtattctggatatacttattcagggtatactggatgtgccagatgttattcttggcaccaagaatacatcagtgaacaaaacatacacaatttatgtcctcatgagacttagagcatatggtatatacaggaaaataagcagacaattccaacttaacatgataaatgaagatagtggcaagagagtgcttgcagtggtgaactgtggagtctgatctggatagggaagtgaatgcagaagtaggctaagtaaggagaaagtagaggaattaggcgtctgcagttctgaataataatgaaaaatagatctaacaggtttaaatagtgtagaactggaagattgtgaacagagggtaagatagtcacgtttcccatccagagaagacagaatggtgaagttgatgtgtggtcttacggtggcaaaagaggacttgcagtgaaagttggtggaagtgaaatgcttatgatgttaacagtagagttgggagttccctggtggtctggtggttagaatttagcactttaactgctgtagcccgggttcaatccctggttagggaactgataccccacaagcgatgcagtgtgttcaaaaaaacaaagcaaaacagagtgttgaatggatgtatgttgaaataattcaaggttacacggtacttaggatagagaaacttgtcatgtgctatgtgtcaagagttttgagtgaatgattaggaatgccttggggatcagtggcttgtacctgtgactgcatattgcaaaatcacctggggaactttgcaacctaccaatgttacttatcctaactttgctgcacgttagataatccaatggccagttcccagcctcagctgttctgatttaatttgtatgggggtgtaatctaggcagtgggactttaagaagcccctaggtaattgtgatgtgcagcaattgcacagtgacagggtttttatttttattttttcctttttacaggagactggctgagagttatggttaggactatgacccttcattgtgaagttggggtacttgataaatgaaagagtaacctttgagagtgctgcaggggaagcagcttttatgtaaagcaaacagtgaaactgttgatgatatagatgcatttatttttattatatagcagaataaacccagagggaggttttgggaggaagggaagcaacgggaagttggataaaggaggaagtaacaagaacagtacagtcgttagagtacaggagaggactgataactacatttatcttttggtagtgacatggcaatgataacagggcatcatgggttcagaactggtctggaaaatacatttagtggccccatggtcgatgagagttgggaattgggtggatggctctcaggagtcagtttaagacctagatgggctgaacttcataggaaatcctagctctgtattcttttctttgttaagggatgtggattggttgtgtaagatccatggagaagcccagcatttcacactgctgttccacaggctcctaggggagtgttgagaggactggtcttttttgttaccacagtagcaggaggcagctctggagtgtcagggtctggttagttccgcccagcatagctcttctcactgcttacttgtgtgagttggaccctctgctatacctaagaacagcaaaacctttgctttttttaatttttacacttgatgcttttcaggaacaattttaattgcacaactccagatttttttcagtgttgaagaaatggtgtagacttagaaacagtgaaaagggaccttgtatattacctagggaaactttatacattggaattttatgcatagaggattgagatgagtttcataaaccattcagtctggattaactaaagtataaactatatatagaactagaagtttataattgtttcactgattcaaatttgtcagaataaattagtttactgcacttcatttgtttaatttgatacataacttgacttttttgcattgttaaacttgagagatgtcaacagagtgtagcaaatttatttttcttttaaattaaaactttttaaagtataatactagtagacttcaagagctactctagttatagaaatgaactgtggaattacttctgaaagacgagtacattcaaaagcataaaaaattataatgtatttttggtcacagtagggtaagtagtatagttgttgatttggtggtagctggatatataaataaaattgtatggtaagtggaaaatatacttttgcataattacagtatattatgtcagctagtaattaaaacccatgtgcccttactaagcagaatatatgtccatgattaaaagctgttatacttttaaaaattaattgattttgtgttcggtgatcttatttcatgtttgaattataaaaggaaaattaactttttgatgttgtgacagcaagcatatgatgcctatgatgggtcataggggtttaggttacatcgaaaggatgcttttaacagccgcttgtgacatacatcttttttatatgtatcttttgtgttcatggttttcagatgtgcttagcaagatgactgaagagcagttattggtaaatgatgctcgtttcccttttctcttctttggtttgcattcattgatttacctctgtttatgtgggtgtgaatggtacccatttttctaaagctcaattgatatttattaaaaaaaaaaaaagctgcacagctactcagttggctcaatcatttgtgggcacatctcatagtttagtttgccaatacagattgaaacagttcataggagtgttattaagatatttctttggctgtggcagctgacatcatttggcttaagttttctagaccaaaattatttctgttatattatatggtgggagattctgataactcaggtcaacatttgttatgttagaatatagccaaagctgcttcctgaggaaaattttggcttgcttatgtggctttagtctgccaacttataagagttgtgagaacactagttaggctttttagtatttatggtttaccttatttttagctgtatatattattagattagggcttccctggtggcccagaaggtaaagaatctgcctgcaatgcgggagatctggattcgatccctgggttgggaagatcccctggaggaggaactagcgtggcaacccagtctagtattcttgcttgcagaaacaatcctatgaacgtggtgggctgcagtccatggggtcccaaagagtaggacgtgactgagcgactaagctcagcacagcacagcgcattaatagattaactctgaatctgcagtacagactaccaacagtcagtgaatgcaggttacataatgctcagcacctcttaaagcctgaaaaaattgatgttaaggaaaaatgcctaagagttatataatccagtctttcttctagatttgcaaatttcatttatttatttgtaattgtggttaggttctctaacttctgtccttggatatagtgtgactactagaaaattacagtcttagaacacattagttttacttctacagaattgcctttattgacttgccttttaatgtcagttcagttcagttgctcagtcatgtccgactctttgtgaccccatgaatcgcagcatgccaggcctccctgtccatcaccgtctcccggagttcactcagactcatgtccatcgagtccgtgatgccatccagccatctcatcctgggtcgtccccttctcctcctgcccccaatccctcccagcatcagagtcttttccaatgagtcaactcttcgcatgacgtggccaaagtactagagcttcagctttagcatcattccttccaaagaaatcccagggttgatctccttcagaatggactggttggatctccttgcagtccaagggactctcaagagtcttctccaacaccacagttcaaaagcatcaattcttcggtgctcagccttcttcacagtccaactctcacatccatacatgaccacaggaaaaaccatagccttcactagacagaccttagtcagcaaagtaatgtctctgcttttgaatatactatctaggttggtcataacttttctaccaaggagtaatcatcttttaacttcatggctgcagtcaccatctgcagtgattttggagaccccaaaaataaagtctgacactgttcccactgtttccccatctatttcccatgaagtgatgggactggatgccatgatcttcgttttctgaatgttgagctttaagccaactttttcactctcctctttcactttcatcaagaggctttttagctcctcttcactttctgccataagggtggtgtcatctgcatatctgaggttattgatatttctcccggcaatcttgattccaggttgtgtttcttccagtccagcgtttctcatgatgtactctgcatagaagttaaataagcagggtgacaatatacagccttgacgtactccttttcctgtttggaaccagtctgttgttaaagtcattatgagacgcagttttgttaaactttataatgactttcatgtaaaactgtctgagaacattaaccaggacttcatgctttttttttgtcccccagaaaaaattcctatttgatacaattctttaaaaattcagagctgcagatatggagcaacagttaatgagaggaagcttggatatcatctgttcccaatctgtttacagatgaagaaattgaggctcatagaggtcagctataagtggctggcctagaacccggttctagaaattgtgtcttctaacagctgacccagtttttttttcttatttaaaagttttcaaaaaattgaggtgaaagtgaaattgacataagatagttaccattttaaagtgaacaattcactggcatttagtataatcacagagatgcgcgatcacttgtatctagttctaaagcattttcatcaccctgaaaggaagattgtacccactatagctgcttcccgttttcttcccctagcagttggcagccatcgttctacattctgtcttatggattttctagttcgggtatttcatataaatggaatcacataatatctaccatttgaacctggcttctttcacttagcataatgtcctgtccccattgtagcatatatcactactgcctcattccttcttatggttgaagaataaatacttttttgtaaggagagaccacaatttgcttatccatttattcattagtggacatttaggctatttccatcttttggctgtgaacgtatacgtatatgtatttgagttttcagtcctagatatattcctaggagtttaatttctcagttatatggtagttgtatgtttaaagttttgagtaactgtcagtccattttacacaatggctacatgattttattaatacatacatattaatacttagtaatacgtatccccagtttcctttctacttctctttgtaaaatcatggtgacttcaaaaggaagatgaaccgaagatcaatttgtttttttttaaggtgtcaacttttatttgatactcttataaagtagagttttcaaacaggtttatggtttttctagaggttcattgaatatgatcttgctttgttcctttcattcaaactgaagtgaagttgtgctcctccatttcttttctctcactatatgttgttagaatccataagaatggttttaggggtctgtgcatgcatgctaagttgtgtctgactcttgtgaccccacgggctataggctgccaggctcctctgtccatgagatcctccaggcgagactactggagtgggttgcatttccttctctaggggatcttccagacccagggatcaaacccgagtctcttacatctgcattggcaggtggattcttcaccactagcgccacctggtaagccctttagaggtctgctgctgctaagtcacttcagttgtgtccgactctgtgcgaccccagagacggcagcccaccaggctcctccatccctgggattctccaggcaagaacactggagtgggttgccatttccttctccaatgcgtgaaagtgaaagtgaagttggtcagtcgtgtccgactcttagtgaccccacggactgcagcctaccaggctcctccgtccatgggattttccaggcaagagtgctggagtggggtgccattaatctgtttactgtacaaaataaaatgaaaatgatgaaaaagaaaaaatagagaaaaaataatagcgaaaataatcttgagtaccttcaaggttatttataagctttgactttagtgtgggtgagatttctttgtgttctacttttgcaaagagcttggcagttgttttttgtctctttatccattctgtcactataacttacttatgaaaacagtgctttgtattatgcttgataaatgggtaatgtagaaatttcaaagtaaatggtttaaaatagggtaaatagtcattagataccttaagtttttgaataaggttgattttaatttagtttggagtaaataatgaccttctgacattattaaagtctgcctatttctttcagtatttcattttttaatttgatttttgtcataaaatgaccctaagttatatttaccaggaaaaaaaaagttaagatgctaatgtcagctctgaaagatctaattgagtttttctgttaatagagaatatattaatagaatataaacttatatctgtagtactgaggaaagaatctgaaggtcattgtttttatgttttcgttttaaagatagagacctactgaaaaggtctttagctttatgaaaagtatgagctatgttagacttttttttttaagtatataaggcacagagattctggaattatcttcagtgatgagaattttataaggaactggagaaatttgtgaaaaaagagtcttattagatagccagacttcacagtataccagaaatggttactggaacattttatatacatacatacacacacacacacacacacacacacacacacacacaaacagatctacacacacacacacacacaaaaaaaaacagatctagctacacacacacacacacacatataaaacagatctagacacacacacaaaaaacagatctacacacacacacacacacacacaacagatctagctacacacacacacacataaaacagatctagacacacacacacccacacccacacacacccccacacccacacccacccacccacccacccacaccccagatctagctaatggttaccctgtgacactccctagcattaggcttttattattgcctatgctggcgctgtgccatcatgattagctctgttgctctctcactgctacttttattctcatcaccctcagctgacagttgcaagagattttattggctagaagacagtcaccacttactcttgattagctatattatttgatagagctattctgtttggctgtttcatagaccattaaaccagctatagaaatctaccctgtaactatggcccagtgtgatgggggtcattcttatgattcagagcatggtgatctgtacttcaggaatcccttggaagatggtttaaaccgtagtcggcaggcatttttaagaagcccaggaagggaggcagtgtatcagatgagtgctctgtcctcattggcagtttcatttttttcacatagataactatatttgcttcaggtactgctttttggatttctggtagtcttaatgattatctcaatagcaaaataatttattacgtataacccagttaagggttttaggatagagcctttttattctcctaagtttacattctccttgcatttacagaagttcacaagagacttccaaggagttgccttgagcatatctgtgaatttgttacacttacacacccctcactatcatctcaagttaatttttaagccatttaagtataagaaatatgtaattcagttccttttagaagtgagtaaacaaatgttgaccgacattttgattgcccagggtcacatgatctgtgcagagctcagattagaaagcatagctacttgtgtattgcagtgtgtggtatctatttagacttgaaacaaaaatgacttccatgttgttggcacttatctaatcttgtgtaggaatttttccagttaggacttgattgtcattgaaaggaatagacatgcaccctagttatatcacataaaatggagaatccagggtagtacagtggaatgcagctggtcctgtgggaactaaaatgctgacctaaaatctcagttctctctctttcaagcaatcacagagtctcttgtcttgtctttttagagtgttatctgcctcatttctgcttttctcacttggcttccttgcttaccgagtggcctgtatgtccccttaaaattccagtcccagaatatacataccctgtttcaggttcagtgcccatcattgacaggcggcagcttttaacttttcagattactgagaaagagtccagctcagttcgctgatgaagcccggtctcaccaagtatatcactgtgtgccttggtacacagccctggtattccttggctgtctttgcatcaggtgtatactcctggtacagtcaaggttggagatgaggcagagaaggatgggtaggttaatgcaattctcagggctgtggataagaagatgagatcgccagtatgtaagaattactgatttcatttttagttgtttgtttagtaaactactaaatagatcttattttgaatggcagagactgaataggcattatcatggaatatctctagatcccatacatttctgacatttttaagtttattaaatgtaaataaatcttaaaagtagtagctctcaagagtggagatactgcttctagggaatgtttcttttaaggattcccccctttggtcagattatttattttaatacttccctggtggctcagagattaaagcgtctgcctgcaatgcgggagacttgggttcgatccctgggtcgggaagatcccctggagaaggacatggtaccccactccagtattcttgcctggagaatcccatggacggaggagcctggtgggctacagtccacggggtcacaaagagtcagacacgactgagcgacttcactttcactttaaaattttatggtccatttttttttgtgtgtgaatgagtgtttagtctaatagaaagggagattcctactgaattcatgcatgcattcatacatatcatagaatctttgtattgtgttccaggaattttgctagctgtgggtgcattaagttgaatatggtattttctctgctcttaaagaattctgtgctttggaagctgaactgtctctaatgaaagaggtctgactctctttgtacctttgattccttcacctcctgctctgtgtgtcataccttatctcacttctacattttactggatccttccctagagcctgagtgcgtgcatgtgtgtgctcagttgtgtccaattcttttgtgaccccacagactgtacctgccaggctcctctgtccatggaatttactaggcaagaatagtggagtgggttgccatttcttcccatcctaaaacctgatatatctttacaaatctgttcccactcacctcggaactactgcagtctatttttgtgtttactactctttaggtgtcactctcagttaccttctagttgtcaaatcctctggacatttactggcctttacctactgagctcttctcctttagacctgttgatcatgctttctaagattgtagggctccatccgttactggttctttttatacctttctgagcttaccttctcaagtcatcttcatgagcttcatttttccttttctgcttcttaaaatgttgatgttaccagtatttcatccttgactttctgctctcttcataatatgcttcattgtcatttttttagatgactgtgtattgatcagtcctgaatattcccttgaaaataacttgtactactatattcatttgcttgctggctgtcttcacttaggctctgcatatatctttactctgaatatgtcccatactgaacttcacttcttcatccacaaaacaaaacagcaaacataccatcccccagcttgctttcttgtatcttgtttagggtgactagttgttcagtcagcttaagaagctgtgatgatggctctttctcatgttccatgcagtctattgatttgttgatcagatcttctagatatttctccagtatgcagatttctgttcatcacacctgcttttgctttatttctggcttttaggtaatatgactatcattgctctttatagattttcctgcctatttcaaatcttgcacataattgatagaatgatttaaacttgaacattgcatatgcctctgacaatctatcctttaaaaacaacttgcagtggcttccctatgggatactctgttttgcttcagcgcctgctcctcttgtcttctcattgtcagttgccctcttcttcacttggctgtgtcctgttagcctctgagattaatggtacagatcacctttctcaggaggtgtcctctgatttgtcgcccctcctcctttttaggctgttggagtacctgctccttacgagtgccttgtaatagctgatgcgtgtttgtcattttcttactgtattattttatatgtaattctcctcctccacaagattgtgagcttattgagacccagaacaatcctttacttgcagaacctgcctgtagggagcacatgctggactttcctaaatgtttgatcaatgagtgaaggacgtttctggtctagaaaaccatgcataaatcattgctatagaactttaaatagtgtggtggagacagggaatgcgaggactggaccttctagctgggaagggagaggcacttctaagggaagacttcctttatagaagatagaagttcgagctgatttcttgaagggaacttgatagaggttttgctagaaacagagaatccatcccagagaacaaaaccaagagaacaggtcctactcatgaaaaagccaggcatttctaattcagaggtcattttggcctttggaaaaaaggaggatagaatagaggagaggctgggtggaagatggaatagaggagaagcagcaattgtagtcttgcaggcctgagcgaaggtcttatctcaggctttggtgttgaggagacggagggccatgagagatgcttaagctgtaaaatataataattagttgagtgtgagagttctaagagggcagttcaggataactcttaagatttcttttttcagtgattgattaggtgctggtatctccttttaatttaaataagggaatataggaaatttggggtatggtataaatttaattttagacatgatgagtttgaagtactcgtgagaaattcaggcaaaaacgttcagcatactgttgaatataagtgttagaaactcaggaggtgtatctggattggagacacagctttggaagtcatggtacctatgaggtagttagaagtaaacaaggttacttagggattgcatatatagcacggctgtaggagagcaaaaacagaatcctgggacttgcaggtgttgttctgcttaaagataatctggaatacttggaaaggagtatcaatttccctgtattctttccaactttatcagatttcagaaactttctctttgcagcccctgtttgttcctttcattctttgttgttgttcagttgctcagtcatgtccaactctttgcgaccctatggactacagcacaccaggcttccctgtccttcaccatctcccggactttgctcaaacgcacgtcctttgagtcggtgatgccatccaaccatcttgtcctctctcaccctggtctccttctgcctttaatctttcccagcatcagggtcttttccaatgagtcagttctttgcatcaggtggccaaagtattagaggttcaacatcagtccttccaatgaatattcagggttgatttcctttaggattgactggtttgatctccttgccatccaaggaaccctcaagagtcttctccaacaccacagttctaaggcatcagttctttgacgctcagccttttttattgtccaactctctcatcctgctggaaaagactgttggactacatgactactggaaaagccataactttgactatacagacatttattggcagagtaatgtctctgctttttactacgatgtctaggtttgtcattgcttttcttccaaggaacaagcgtcttttaattttatggctgcagttacagtctgcagtgattttggagcccaagaaaatagtttgccattgttttcattgtttccccatctatttgccatgaagtaatgggactggatcccatgaactcgtttttttgaatgttgagttttaagccacctttttcactctcctctttaccttcttcaagaggctcttccctttctaccgtaagagtggtgtcatctgcatatctgaggttattgatatttctctggcagtcttgattccagcttgtgcttcatccagcctggtatttcgcatgatatactccacatataagttaaataagcagagtgacaatatacagccttgatgtactttcccagtttggaaccagtctgtttttccatgtctggttctaaccgttgcttcttgacctgcatacaggtttctcaggaggcaggtaaggtggtctgatattcccatctcttgaagaattttccagtttgttgtaatccacacagtcaaagactttagcatggtcaatgaagcagaagtagatgctttcctggaattctcttgcttttcctatgatccagtggatgttggcaatttgacctctggttcctctaccttttctaaatccagcttgaatatctggaagttctcggttcatgtacgttgaagcctaacttgaaggattttgagtattaccttgctagcatgtgagatgagcataattgtatggtagtttgaacattctttggcattgcctttctttgggattaggacttccttggtggctcagacggtaaagtgcctgtctacaatgtgggagacccgggttcaatccctgggttgggaagatccactggagaaggaaatggcaatccactccagtactattgcctggaaaatcccatggacagaggagcctgataggttacagtccatggggtcgcaaagagtcagacacaactgagcgacttcactttaactttctttcactttctttgggtttagaatgaaaactgcccttttccagtcctgtggccactgctgagttttccaaatttactggcatagtgagtgcagcactttaacagcagcgtcttttaggatttgaaatagctcagctggagttctgttgcctctgctagctttgttcatagtaatgcttcttgaggccctcttgtcttcacgctctagcatgtctggctgtagctgagtgatcacaccctcatggttatccaggtcatgatgatcttttttgtacagttcttctgtgtgtttttgccacctcttaacatctgcttttgttaggtctgtaccatctctgtcctttatttagcccatctttgcatgaagcgttcccttggtgtctccagttttcttgaaatgggatctctctttcccattctattgttttcctctgtttctttgctttgttcacttaaagaggctttgttcactttgctattttttggaactcgtgatttagatggctgtatctttccttttctcttttgcctttttgcttctctttttttctcagctatttgtaaggcttcctcagacagccattttgcctttttgcacttcttttccttggggatggttttgatcaccacatcctgtacagtgttatgaacctctttccatccatagttctttaggcactctatcagatctaatcccttgaatatatttgtcacttccactgtataatcataagagatatgatttcatttcaattcattctttatgcagctggtttcttcttgaggctgttagtttattcctctttgaagtgtctgttgtcaaactaaactaggggaaaggaagtgcttaaatcatttatgtgaattcacatcccttcatgaaacgggcataggtattctaagtttacttctactaagaaacagactgccattttttaaacatattacattcttggtttatctttttccttttttgatagtgatatagatacagataaatagtttgcttctttctttaaaataactataaagtgataaatcacatcttggactcacatcaggtacaccttgtagcatgtgttgggactgtggcaatcccagctttgtggcttattttcttggagattgttgcaactcagctttattccattattgccttgcagaggtgattcctgatttttctgtttttcgagaaaagttattttattcttaggtgattcaaaaaaattttattcagaatttaacaaaataatgtgctggcaatttttgatccctttcttgaactttaaattctttgtatcaaagaccaaccctcatgacctactgaaatgtctgagatacctttggttctgttacatactagggtaggagaggaaacttgacttgaaagcctcagctgactagtggaaaaggagacaggctcaatcccttgattttgaagactgagtaataatgagccatgaagtcagatgggctgagacctatcccattttcagtaagtaagctggtagtgaatactccccacctcagttccttatctgctgaagttttgatcctggataccatggtcagtgacttgaaactagagtatttagttaggatatttttctattatttcattttgcatatttaagtacaaaattaaacacacacacatacaaatgcaattcgggtattttgccaccagaatgtaacccacatgaataataatgtttctgtcacttggtgggtttcaacttctgagtataatttgttagggcttgctgtattatctttatttgttttgtttgagtcaaagtaaaggctttttatagaaaaatctcttccagggtgatatgttagaactggcctttggcttttctgtttatgctccgtgggagggaaaaggaatgattcctgcaagtggaactgtcatagttttgagtatacatgttcccttttagcaacaactttcctttgtaataaattccatttgtataaatgttgctgctgccgcattgcttcagtcgtgtccgactctgtccgaccccatagacggcagcccaccaggctcccccgtccctgggattctccaggcaagaacactgcagtgggctgccatttccttctccaatgcatgaaagtgaaaagggaaagtgaagtcgctcagtctcttagtgaccccatggactgcagcctaccaggctcctccatccatgggattttccaggcgggatttcccaggcaaagttgttagatctcataattaaaaattatatttaaaaagctgtcccacaagatgttagtatttgattgttgattttgatctagctggcttttgaccacaccagattatattatgagaggaatttacacactaggtatccggaataaagacagtgattttctttgggaggagtggcgttttgatggagctagttgaagtatgtgttaatgtgttatgtcaactaaaattctgatcacctaacaattttccttaaatatattacacgtattttgtgtatgttctcttaggctttcctgtatcagagatgttgatctcttatttcctatactaagatgagagattatgaaatctgtgaaatcagtctaaataattgattttaatataatgtaaaaataggtttctttatactttatttaaagttgaatgaattttgagcagttttactgttgagtttgtacttttgggcattgataaggctggctatgactgtgtaccagttttttataattaatgactgatagtgtcttgttaccattgtctccttttgtaaaactatgttgtgcttgtgattatttatatgtagtttttaaaagactttttaaaagagcagttttaaatttgtaacaaaatcaaaaggaaggtacagagatttcacatgtgctccctgctctcacacagtctctctttcattatcaacctctctcaccagaatgctgcctttttttttttttttaaccaaagatgaacctatgtagacatgataatcacccaaagtccataatttattttggggttcaaaactcttggtattgtatgttctgttggctttgataaaaaataataatgtctatccatcattataataacttgcagggtattttcactgtcctaaaagttgtctgtgctctgccagttcatcacccagtcttataccacgccccatctttttattgtctccatagtgttgtctctcagaatgtcatatgcttggaatcatacagtaagcagcctttttgcattcgcatctttcactctgtagcatgcatttaaagttcctcaatgtctttccatggtttggtagctcacttctttttagcgctgaacaatactccgttgtctgggtgtaccacaatttgtatatccattcacttactttaggatgtcttggttgcttccatgtttggcagttatgaataagttgatttatgtttttgtgtggacgtgagttttcagttctcttggataaatcccacggagtatgattgctgtatggtaaagagtgtgtttagttttgtaaggaattgccaaactatcttccagtgtggctgtgtgattttgccttgctgccagtgagttcctgttgctccacattcttgctagcatttagttattctgtattttagccgttctgattggcatgtagtggcatcttactctgttttaatttgtgtctccctggggacatacgatgtggagcatcttctcatgtgcgcatttgccatctgtatatcttctctggggcttccctggtggctcagatggtaaagaatctgcctccagtttagagacctgggttcagtcccttggttggaaagatcctctggagaaggtaatggcaatccactccagtattcttacctggagaatttcaccgacagagaagcctggtaggctacagtccatggggttgcaaaaagttgaacataacttagcgactttcactttcatatcttatttggtgagatgtctgttaaaatctgtggcccattttttaaccagaatttatttccttactgttgagttttaagagttatttgtagtttcggataaaaaggcctttattagatatgtcatttgcaaatatttttccctaatctgtggcttgtcttttaattatcacaataccattttgcagaagtttttaattttagtgacatctagcttatcaactaattttttcatagattatgtctggtgttacatctaaaaaggcatcaccatactcaaagtcatctatgttatcttctggagatttatagttttatgttttacatttaggtatgtggtccattttgagttaatttttgtgaaaggtatacgatctgtgtctcagattaattttttgcatgtggatgtctgattttgatagcaccgtttgttgaaaagactgtcttttggttttgtgtagttttggaaactgttcgatactgtatttatccctcacaacttactttattgccttttatagatggagtcttaaatatacttagacataaaagtataaatagccttgagcattgggcttaagttcagtaaacaaatgatattctctgtcctacttttgagtcaaagagtacttcccctttggcatactcttctgtagtgctagcattttaaaatctttgttcacttagaattttactaatcagcttccaataataccattttgatggaaagaaatgggtaactgtaaagaaaagagattgatttttcttgttcacctgcaaaactgcttttggaagacaaagcaaatttatcactactgtttaagctctggaggacttatcttttttgtattctcaaacattttgtaacttttcattatggcacttactacaattgtttatcgttccatgtgtattttgcctgcctagtttgtgagcattttgagggcagaaactgcttgattcatctttgtatgattaaggcccaatacatagctgtccagttattataggatcagtgtaacctcccaaaacaataattttagaagacagtagttcttatttaaaatgaatgcataaaatgaatgcataacccatataggatgttaaaactcattacttaaagtagtttcacatttaaaagaatctttgtcttgattgaatagccaagtgtatattgctttactgtcaactaatcacagaaatcttttaatcccaagtctctgggctatgaacatttagcatgtttgtggactgtttatttctggtattgattccttaagaaatacaagtgcatttactatgtaagtgaattttgtgattattgtgtgttttaaaaaatgttttcagtgaaaaatttcaaactttaaaagtagaaagatgagtgtaatgaacttccctctgtcacacccagcttagacatttattacctcatggctaattatattttgtgttgatcctttttcacttttcccctactgtctacttccaggattattttgaagcatattctagatcatatgattccatctttaaatatttcatcatgcatctctaaaacattaagggttctttttgttaaagcataatagctggtaccattcattatatcaagccaaaaaataaacagcaacttgttaatgtcattaaaaaatgtttataattacccagtttctcttccttctttccctcctcatcctccttctctctccactgtatttttgttataatcgaggtgaataagtttgcatattgcagtgttaaaacctgcagattctccttaaccttcctctcccctcctctttcttcccccttgccctgtatttgttgcaggaattggatcttcttccctttactgtttctcatagtctgaattgtgcttagttcatctccatgatgtattgtaacattttctcagtctttgtgcatttcctcagtcagattcaggtttgatttccccccaccccacctgcacgaaactttgattgatggtgatgttgaagctgaaactccagtactttggccacctgatgtgaagaactgactcattggaaaagaccctgatgctgggaaagattgaaggcgggaggagaaggggacgacagaggataagatgattggatcacatcaccaactcagtggacataagtttgagtaaactctgggagttggtgatggacagggaggcccggcgtgctgcagtccatggggttgcaaagagtcgaacacgactgagtgacagaactgaattgatgtgtatttttattccaagaggcatgtatgtttggttcatattctttctttctatcttttccttcttcctccctctctgcctccagtgccttacctagactgctaaatcactaatatgttcagttcagttcagttcagttcagttgctcagttgtgtccgactctttgcgaccccatgaatcacaccatgccaggcctccctgtccatcaccaactcccggagttcactcaaactcacatccatcgagtcagtgatgccatccagccatctcatcctctgtcgtccccttctcctcctgcccccaatgcctcccagcatcggggtcttttccaatgagtcaactcttcgcatgaggtggccagagtactggggtttcagctttagcatcactccttccaaagaacacccagggttgatcttctttacaatggactggttagaactccttgcagtccaagggactctcaagagtcttctccaacatcacagttcaaaagcatcaattcttaatatattagggattgcaatatggcaatattctgtcatttcttattatgtgaatttttctccttaaagagaaactgattttttatcaactctctgatcaccccagtaaatgcctaattctctaacacttttcaaaaatagttggttctttagaaccctccaaagatcagtgaaacttaaaagtatctacaatttcatgaactcagatatttgaagtactccagtccattgtggttgttattgttactgattccatttttagccaggtgaaacctcttcaggttgtctgctgagtttgacattttttcagtaatctctttagtagctttctggtatgataaaatgttcagacccatcttaaactcatttcctgctctagccttggaattagccattccttcaatagcctgagttcattttgttggaactgtcaacactatttgttactgaagcaatgattcacagtaaaattactatattttaaaatcacttggaatacttcctctatgtggtttttccacattgttagtatatacagttagactttcagatttcactttgctttttagagattgcttttgaaattctttttatgtgtaagatgtttataccaatacaaaattagatctgcagagcaaagtattttcaaagtgcctagttctcatacctatcctcttttaccccattttctccatttcttgtagatcatttaaaaaagtttctgtatatctttatatttaaaagaataagcaaatgtttctatatttataactgttaccctccctttcttggatgaatgatagctatacatacttttctttactggtatgtaattgaattcaaaaaatagtttgggtacatatgctaatacaaaaaaatttgttcaaaatgcacaaaattggcattttctaatatattgatgggtttgattagcttgcataattagatattcagctgtcttattcttttgtagctttaaaacttgctttgatcagttatttttaaggggatacttttcctttttacatgtcatttatatatacataatacatatatacacacatatatttgtttaggaatgagactgatatatatatatatatatatatataatgagactgatatatatatataatgagactgatatatatatataaattaaaaatagacatttatctgtcaaatggaaacataaggaaagtaattttctttttgataaagattacaagtttattttaaaaactctttactatttttttagttatttattattaaggcacaaaagccttgtgtgtagttagaaaactatagcttctaaaaagcacctttggttaatttatttcagcttaatgtatcttctgggccttttatcagaaattcaggaaaccttgttaatgtggttttgcagttggaggctttgagcctgctcgaagcctgtcaggactgttctttgctatactgctccatccacattttaaatacttttattattctttctgtataagggaaagcattcagtaaatgcagtcttttgttttttcaatactgtagtttcttttagactctgattccagtggttcccaatgtatgggctgtgggggtggggagaggttctgcagcccaacttagtgtgtattctgaataagcaaatgcctatgaatgtacctgttacttattcaaactgtatatagttattttgtaattgatggaatctcatttaaaagacactgaattaattgtatcactttttgttttcttgtgttttctgtgtcattggatgctaggtgtgctaattacatagcagtatgtgaccttctttataactactgctctaataaaaaattaaagggtttgttaaagtagttacttacatgtgtgtacataattaatttttgaaaatatgtaaaagtttaactgtagacctccattttaagggagagagttctgttactagagaactgactacatgggcctagtgtatatgtatgtatatataacacatatatacatacatatacatatatacatatctgggcacccctggttgggagtgggaggagaaagtccacaggtacccagtggccatagtctttgccagctgggcagttgaccgtcttattagagacaaggccctctccttcctggcccagcagctggattgaaaacatgcaccatatcacgctggtgtttaatcatcctcacaaggatatactagttgtgagtggaagaggatctttatttacatgtccccagagtatcaaacggagaaggcaatggcaccccactccagtactgttgcctggaaaatcccatgggttgtggagcctggtaggctgcagtccatgggatcgctgagtcggacacgactgagcgacttcactttcacttttcactttcatgcattggagaaggaaatggcaacccactccagtgttcttgcctggagaatcccaggggtgggggagcctggtgggctgctgtctcgggtcgcagagagtcggacatgactgaagtgacttagcagttagcagagtatcaaaagagggatttgggaccaacttagctaaatgtactgatggtccctctgaggcagcctctccgtgctgcctccctgaatgggaagtagtgatgtaggctggtgtggggtatgctgaaacctttttttcaaccttttcctctttttttctttgagattggggccttgttgtgggttatgctggtaggaatgtgtagctctgcacagttctaaggtgggagtgaggaggaggacttcaatttagggtccttttctttttcactttccctttccttttcttgccctttccttttttcctcccttttgcccttctcccgtctctttctgttacttccctcattttacttccctcattagtaaatgaattacttggttccatatttactgagcagcttctttgtagcaggccttggttaaattactgtatattgttgaatgagccaaagttcagtgtcaggagctcattctattgcaattacttaccgatgggataaggtggaaggaaaacaatctatagtttcaataaggccattcttcttctgggtacttatttttgttgttgaattcctgtatgtagtttctgtgacccaggttggcactgaagtaatatcagctttatgagtctcagccctgtctggctggctgccctatgccatgtaatgtgttgagacataccaggtgaatataactgagagtggctgagtcactctattgagactcttcagtacagttcagtcgctcagtcgtgtccaactcttgtgtgaccccatggactgcagcatgccgggcttccctgtccatcaccaactcccataggttacttaaactcatgtccattgagttggtgatgccatcccaccatctcatcctctgtcatccccttctcttcctgccttcaatgtttcccaccatcagggtcttttccaatgagtcagttcttcacatcaggtggccaaaggattggagcttcagcttcagcatcagtcctgccagtgaatatccaggactgatttcctttaggctggattggttggatctccttgcagtccaagagactctcaaaagtcttctccaacaccacagttcaaaagcatcaatcttcagtgttcagctttctttatagtccaactctcacatcagtacatgattagtgaaaataccatagctttgactagatggacctttgttggcaaaataatgtctttgctttttaatatgctgtctaagttgatcatagcttttctttcaaggagtaagcatcttttaatttcatggctgcggtcatcatctgcagtgattttggagcccaaaaaagtagtctgccactatttccattgtttcctcatctgtttgccatgaagtgatgggaccagatgccatgatcttagttttctgaaaggtgagctttaagccaactttttcactctcctctttcactttcatcaagaggctttttagttctccttcgctttcttccataacggtggtgtcatctgcatatctgaggttattgatatttctttcagcagtcttgattccagcttgtgcttcatccagcccagtgtttctcatggtgtactctgcatataagttaaataagcagggcaacagtatatacagccttgatgtactcctttcctgatttggaaccagtcagttgttccatgtctagttctaactgttgcttcttgacctgcttacaggtttctcaggagacaggtcagatggtctagtactcccatctcttgaagaattttccacagttttttgtcatgcacagagtcagaagctttggcatagtcaataaagcagaagtagatgttttttctggaactcttttgcttttttgataatccaacagatgttgggaatttgatttctggttccttaggagagtccaaagtctgttctctggaagctctgacagtctgttcttcctgtggtcgaaaatagctgtttccacttagccccactccccacatataaccgggagagtttatgcctggctctacatcaaagttacttaatcagtctgcctttgatggacttgacttgagagataatttcacaactcagctccttgattatgctagtgtgaattctgaatcaaagagaggttagtgattttgcagcggttacacagaactttagtggcaaactggcacctgtaatttctgattctgtttttagtactgtattatgctacctttcctgtcatagaagtctgtgatgaggatcaaatgagataaatggtagtatgaattaatagacatgaaatactacaaagtaagttacttctacatgctttctactatcaggaggcatgtaagactttttacattgtcacttcttgattcttaagcatcatggcagcaggggtcattttttatgtctttgtgtgtctctctgctcaaggccaaactgatatgcataactgatatatgcatgctagtaaactgataccctttgaaaccaaaattatttccatcatttatgtaaggaatatgtggatgaactgattatctaataaaacttatactttatgtactttgtactcaaatcgggaatttattacattcattacaagtagttttctgaatgtaattcttgcgaggtatattaagctgattgattaaattaaaaaaaccactcatttatgattttaatttttttttcttactgtgacttttaacttcaggcagttgtcaactgacaatttttaaggttccttaggagtcagaatttgaatagaatcaaatcccactcttactcttattagctgtgtgaccttggaccattaaaaaaaaatcttttctgtcctttagtttctttgttgttaaactagaaataataatagtgattaagctgaaattgatcactagaccagtggtctccaaactttttgcaccagggacccatttcatggagtacgatttttccatggaccagggagaagggggatgggtttgggatgattcaagtgcgttacctctattgtgtactttatttttatttttgttacctcagctccacctcagatcaataggcattagatcccagaggttagggatgcctgcactagagcatagactcatttactacccagagaaaccatacagcatagatgaagaagtgaaggcatggagcggttacacagttaataaataatgaaagttagttttccattcagttgaactccagacttcatgttttttgagcactgtgctatattaccttctcgattacttcttaagtcgttctgaggaggacatgaggtatgcatgtagaatacttggtacagttttggttctcagaggttctggaattgtgagtaaggttttgtggacttagggattagttttggtagcattatagatatataattgtccttagttctgaacagttctggtaaattattagaaatgaaactatcacaaaccccatcccagacataatataccagaatctgcactttaagaacctgcattttagatccttaaagtttgagaagtactgcaagagatgattttggaggtttcttccatcttacagttgtatgtcgataaccttagggaagcagacatatggatatttcagtgttgatattgtatttggagaagaaaatagtaattttaatgaaatattattttactgaaaagtattattttaataaaaatcactgttatgtggatttatttctattcttcagcttccattctgaatttgtaaaaaatttctgatgtagtacaaaactgtcctatattgtatcatcctgtgtcatctaagaaaataatcagaactcaaaaactttgaatggttttagatgaaatctttttcttaatctcactggataataagattataatattagccaaagatataaatgggaaacctaaatacaacataaaacttccttattttggacagttctctatactgacgtttcattgttcagttcagttcagttgctcagttgtgtccgactctttgccaccccatgaactgcagcacgccaggcttccctgtccatcaccaactcccggagttcactcaaacccatgtccatcgagtcagtgatgccatttaaccatctcatcttctgtcgtccccttctccttctgccctcaatctttcccagcatcagggtcttttccaatgagtcagctcttcgcatcaggtggccaaagtttcagcttcaacatcagtccttccaatgaacaccaggactgatttcctttagaatggattggttggatctccttgcagtccaagggactctcaacagtgttctccaccaccacagttcaaaagtatcgattcttcggcgctcagctttctttatagtccaactctcacatccatacatgaccactggaaaaaccatagccttgactagacggacctttgttggcaaagtaatgtttctgcttttgaatatgctgtctacattggtcataactttccttccaaggagtcttttaatttcattgctgcaatcacgatctgcagtgattttggagcccagaaaaataaagtccggcactgtttccactgtttccctttccccatctatctgccatgaaatgatgggactggaatgctatgatcttagttttctaaatgttgagctttaagccaacattttcactctcctctttcactttcatcaagaggctctttagttcttcactttgtgccataagggtggtgtcatctgcatatctgaggttattgatacttctcctggcaatcttgattccagcttgtgcttcctctagcccagcgtttctcatgatgtactctgaatagaagttaaataagtagggtgacaatatacagccttgacgtactccttttcctatttggaaccagtctgttgttccatgtccatttctaactgttgcttcctgacctgcatacaggtttttcaaagaggcaggtcaggtggtatggtatgctcatctctttcagaattttccacagtttattgtgatccacacagtctttggcatagtcaataaagcagaaacagatgatccagtgaatgttggcaatttgatctctggttcctctgccttttctaaaaccagcttgaacatctggacattcacagttcacgtattgctgaagcctggcttggagaattttaggcattactttacttactatttgaagttaaatattataagattaaccacaaaacaaatgtgcacttgacttacttgattggaaatgtttaattttgtcaatccctgtaatatagaaatttctctcagacttaattgaggtaaagggttttctgtaggttttttttcatgtgacagtaatgtctggtttgtttactgttaattcgctcgtgtttggcacattgtaggtatgcacaaatacttgtcaattgaatgaattaagagtgtgtttttttgatgacttttgctaccatcttccaacaagtaggaagagacttgtaagattctgaaaatttgagattttagacagttgagcatctcttcatgttaaataattgagttaataatctttttcagattatataattatgtttctttcttgaaaatctttttaatttttaaatttcttgaattgatattcaaacagatggaaaacatgtttatactgtttaaagcaaatgctttgttaaaaaccaggacgtttgagtactgtttgagaagcccctagtgtattgtcctccaattgcatgctgccttccttccttcacctgcaaggacagccattttgcttggtttcataaaacctctgaatagtaagttgttaacttacttaagttgtaagttgttaaccagtaagttgtttagctttgaaaactggctagcaagcataaatataactttgtaaagaaggaggtcagttcagttcagttcagtcgctcagtcgtgtctgactctttgtgaccccatgaatcgcagcatgccaggcctccctgtccatcactatctcccggagttcactcagactcacgtccatcgagtctgtgatgccatccagccatctcatccttggtcatccccttctcctcctgcccccaatttctcccagcatcagagttttttccaatgagtcaactcttcgcatgaggtgtccaaagtactggagcttcagctttagcatcattccttccaaagaaatcccagggttgatctccttcagaatggactggttggctctccttgcagtccaagggaccctcaagagtcttctccaacaccacagttcaaatgcatcaattcttcagcgctcagccttcttcacagtccaactctcacatccatacataaccacaggaaaaaccatagccttgactagtcggaccttagtcggcaaagtaatgtctctgcttttgaatatactatctaggttggtcataacttttcttccaaggagtaatcgtcttttaacttcatggctgcagtcaccatctgcagtgattttggagcccaaaaaaataaagtctgacactgtttccactgtttccccatttatttcccatgaagtgatgggaccagatgccatgatcttcgttttctgaatgttgagctttaaggcaactttctcactctcctctttcactttcatcaagaggcttttgagttcctcttcactttctgccataagggtggtgtcatctgcatatctgaggttattgatatttctcccggcagtcttgattccaggttgtgtttcttccagtccagcgtttctcatgatgtactctgcatataagttaaataaacagggtgacaattgctaatattgggtcaaatctcattgaagaaagtaggttggatacattatctgggtcatggtctggtttggctttcctgagagtttataagaatgcttttcaggaaagtcagtggaaagttttatttgagtgaatcttggttgaaatagcatctgtttcttgtagttggccatctcccagtactgtaatgtggatcaggtatctgggtgttctgcagaagtattgtcagagggactaaacactctgtagtttcttctaagccaccgtggcctagttttagctcttatatagaagtcaggggaggcatagcctggttccccaaacatggagtcttgtagcctaggtcttaccttaatcaggaggaagtagtggtgggtccactggggctgttggctgtgcccctgcttgtggcctgtctgcagtccctgccccctgcccccagctttcaccaactctttactcgtggaagtcatcaggcaaagtttttactttcgagggacttcgaatcttctaccatgggatcttcttctccatgggatgtggttgggagtccagagatggttgtggttttacatggctttctaacatccagctatgattggtacaaaatttcagaaggtcagaccctcaggtttcattgagtgattgttctcaatttcctagtgtttggcctcagcaacaaactgagaccacatcactattccatattcgagcaggccagcatcgtgaaggtgctttccggcatctgggacttcagaaccgtaggatcaacctgttgtctcactactattagggatattgttgctcagaagctgttgtgtaagttcaagcagaattgatctggtctgcttaccatgtagagtttctttttgtcaagtggaggtttatttcctgagactgcctgtcctctccttctccaaaatctcagagatggaggcatgctgccaccctgcctcatgtagttgatggggaattctcttgtgatctcacacagtcttcaggctgtgcatgcacccctctgagagtgagctgtgggacatgtgggcagggatatgtgacagtgatgggaatgtggctgttgacagtctttgcagaacatcagtcagaggaagttcggaagatgctggtgggagctctgtctgtttccactcctatgcattttatctgtgggccattggatccagtgactctagggtttttggagctatgtaggagaacactgatgtggtccacagtgtcgattctggatgaccacatcagccactgtccacagccagaggatccatgggcttctggaatgcatatatggacttaagtaacccgttctgagctggacagagtagcttcccggtattaccgcctctgtttctgtgctgtgctcgcttcagtcgtatctgactcttcgcagcccgatgttctgtagccctcccagttcctctgtctatgcgatcttccaggcaagaatactggcgtggattgccatttcctcctccagaggatcttcctgacccagggatcgaacctgtgtctcttttgactcttgctttggcaggtgtgttctttactactagcattcccaagaacccctcttccttatctgttgtgtattccagttaggaagaaatgcccaaaagaagtcctggccaccaaacacttctcttacagaagtccacctgaccgacattggtgaacagcatatagtaaaaagccagcagaagctgtgagggtgacctgagagtccgccttccgttcctttgacatctgatcaagttggacttgcctttgtctttgagttattaggaagttctgatgggcagtactgctcactgatgcagaaaatttgacattcttttgcataagagtctttggaacacttctgtggacttttctgaaaagtactgatttctggtcctgattgaaattatctaaagatgctgccttcatcacccttgaatggctttgagttctctaagcgacacagcttcaaatgagagggtctccttcgtctaaagtgacacagcttcaagtgagagagtctccttcatcgtaactttggttttggttccattagctggttctgtttgtagagattttgttagactttggtttaaataatgccgtattctaagtatactttaagactgtgatttacctacatggattatatttttatattctgtaaggatactaaaccagcagacaaataccctagcagagtagtttaaccttattaataagtgcatttcatttcagaataaattgaactaaatctaagctgtttacagaatttcctaaaattacaggatattaaagacagtagcctctgtgccagagatttactgttacttgctgttaaaactggtctttgcagctactagtggtggggctcttcatagcttagtgtgtggaggcaggtcccttctgagctggagtggagaggatggggtcttgtacagtccacatcaccaggctaaatgtttgttgactgcttaaccttgttggttgtcccagagagggttccttgtgtagcttagcagttcctgtactttacagacaggaaagtttcggaaactttaagaatgaagtctgaaaggcctataagcaaatgatgctaaatactttttctttaaagccacagtttcattgttttagttaaaacaggattattaactagtgattaaaaaatttttattagcaacttcaaatataacaactggaataagtctttattttctatatataaaaatgaattttgacagaaagaaaaaaaagatcagggaagaccacttctgtaggtgcagtagtatccccagctgatttaaggagctgatcaggaaggcagagtagaaacttccatcagcaggcattgttgtctggttaaaaatatgagtggccaggttgagggaaaaatataaaaatatgaatgaagtagagttgtataggccttatgtagaagaaaaaataaaaaagccctttactgagggatataaaagaagatatgaataaagggaaaaatactatttggggataggaagactcactattataaattctccttaaatcttatccaagatttgttcatgtgttaatcattgaaaacttcttagaccagtcataatttattttcctccatagccttcatccccatctgatgctaattttgttgtttattcactgagctgtgtctgactgttcacaatcctgtgaactgcagttaactaggcttccctgtccatcaccaactccagaagcttgctgaaactcatgtccatcgagtcggtgatgccatccaaccatctcatcctctgttgtccccttttcctcctgccctcaatctttcccagcatcggggtcttttcctgcgagttggctcttcgcatcaggtgaccaaggtattggagcttcagcatcagtcctttcaatgaatattcagggttgatttcccttaggattgactggtttaatctccttgaagtccaaagggctctcaagagtcttctccagcaccagaatttgaaaatatcaattctttggccctcagcctctttatgtttcaactctcatttgtatattactggaaaaaccatagctttgactatacagacctttgtcagccaagtgatgtctctgatacgctgtctaggtttgtcatagctttccttccagggagtaagcgtcttgtaagtccatggctgcagtcactgtctgcagtgattttggagcccaagaaaataaaatctgtcactgttttctccttttccccttctgtttgccatgaagtgatgggaccggatgccatcatcttaattttgtgaatgtggaattttaagctatctttttcactctcctctttcactaaatatatttatttctttgtctttttttcttctggtatgtaaacttatgaagttatgtaaattcatgagagtgtgcttcttgttcttcccttattagaatgtcttatgccttgtgatagccccagcactttgaactgagagcacagaggaagcaatcaatgactggtgaatgaataaataagtaaaactttctctcataatccatagtacttattgtctattccgtagtcttttggtcattaattttgttcagtttagcatattttctattattttcttttggtttctgttgctttctattattttcttttggttcagtgtctaattgtttcattcctgtaagacattcttctccgtgctccttggtggcaggagtgggacaaatacatcctttgtatacagtacaaggcaaatggatgtaggaacttgttgactgaatacatttatttactcataataaattgctagaatccagtttgccttcaacaaaatgagtgtttttgatacataaaacaatgtatttctaaataaaataggatttgtttatagagatggaatatttttagagatgttttgttgtacttatggtaaattttggtaactgtaagttgtgcagttacaattttacaaatctctacacacaatttgagcaaaagaaaaatatcataattttcagtgagaggtggatttcttacgttgaaattttaatttttaaaaagtctcatgctatagttttaaaaaagagtattctacataagtaaaatctgtaccttttatacttgctattgcatatataaatatgtaaatatttttattataagtacttcattacttctcattccagtgtatctttcaggagtttatataactttttcttgttcgtttattttcccagtggattttttaaaatactgctgatacactatgaatttatttctacttatagatttgatacattgttggagataaatttccaataatgtactgtcaaaaataaatataaaattattgaaacagcactgtcaaatgcttaaaaggaaaaaaatataaactatgaaaaagttttgttggttcttttctagttcctatggaaagttatttatttattaaaaagatttttttcttgctttgtttcagaccagtctgtccatatggggatggggaagccttggcattgtcctttctctaataacctttggaccctttgtaatattttatttggcattttatatcctctgctttgtgggtgggtaagtattctcaatgataattctatagtttatgtcatgttcagttgttcaaaatggaaacatcaccatgatacctcagtaagaaaaaaagcatgaccatgagaaatggcagtatgctttgtgaatgctgttatttttaccaaagttaaaaatagtaaaattaagatacctatagaaataaaagtatcaatagttatgatttgtaccagcagtaggggtagttatattcaaaaataaaatttattttatggtgatataaacttttttgtataatttgaaaagttaagaattttttatttttggtgttctgtaaaatttttaaatactttcgttgaagttctgtgaaattttttagataaggcgagatatagatgggctgtagaagaaccactaaaaactctggattaaacattaaggcacatgaaaggatctgaaattccaggttcattttatgtcgtaaattgatctgttattctgttccaaattattgatctcactgaaacttgctgccacagtaaggggacttcaatttatatattaacaggcatcccccagtcatctcaggatcagttaattaagcattcccaggttactcagttacagtcaatgagaatcataattcctgagtcaaaaatctttcttattttggctctcgttatgaagaatgatggtcctttctttaatgtagctttatatagtttaatgccttatgaattttaaaagcaaaagcaggctcttgtatatattaagtaaaatagttcctataatatataaaataaataaaagtatataagtaaaataatataactgaaagtcatctaagttttactgatttttttctcattaaattttaaaaatatgtttttgttcttttgcctacttaacatgcaagtcagaagagaattaatacattttcttatggaagctaccaggtgtttttttaattggggatggttttggctagtcaaacttaagtttttgagttctgcaatttacctgtatacagtgttgataatttacctgtatacagtgttgataatgtatacattctgcttatagtcaaagctaatcacttattttgtaatataaagaaaacctttgatgttttttcttttttccttttggattgttattttaggatactttaaataccagtgtgggttatttaatggcattccgttatgtttggtcatgcagttttctacagcacctgctttttcttaaacctcaaggctgaagctatgaattaggttctaagatcaggctgttcttagctttctttcctgttgttacactgtgggcaatggtgcacattttatcagtctggtttatgataatgtttttagaaatacattgttaacgtaatataagcattttattgtgtctaggtaaaactgaaatacaagaccaacttgattcttagtaatattgtttggtacaacacagatatgtgaaatttacttataattctgtggccagtcttttaaaaaagaaacagacttgaggacataaattgacttgagtgtatctgtttctccacacgcctccctgtgctgaagagcagtgaggtaacagatagctacaaaaagcagaggaccttgaaactgcctttcagtagctgaagctgactatgtttaatttttcactttctcctcttgtcactatactctttcaatcattgtaagattactataaatcattataaagttaaaatttaattttcatttatggatttcctgtctactcagtagtgcttccatttgtttggtcaattttaaatgtaggaaatactgatagcatttaatcaatacttaaagtagttctaaaccagtatttgtcttactttgactccataattgttttaaaaatagctttttgggatatatttatgtttctttttaaattccagacttatttcaaatgaattataaattgaatcatcttttttctgtatagcctttgtttatattcctggtggcaagttatctctctctaattagttaacagacctatagaaatacatctcattcatctttatccttggttattagcttgcctgcttaattaatgaaggcttattatcctaaagtttgaaaatgttgcctgaaattcttatgaaataatattgaatgaaaacttggaaaggcattattgtataaattcacaaaatgtttatggtttttttaaacttcaaaacttaacaaaatctgtcaattccttgccttgccaaagtcacaaactgactttttagtgcatgataatccgtctgttaaatcaaaaaaatacgtgttaaattgtagtgaaattttgttttgtatctataattaaatttctttcaggggttttgttgttactctcctgtttggaaaaacaaactccgagaagtacctagagcagtgtgaacattcatttctccctccaacatcaactgggattcctaaggtaagaagggtgaaggaaggtcaaaccttaaggtcccgctgtgggtagtgctgataatgtgatcgcttttacattgcttggcacattttcctgtagttcactaatgctcactacaaatttatgagagactactgatcaggcttagaaaatgcatgttggatgttaaaagtgagcatgcaaatttgaggaaaagatgcaaatttggaatcttttcctgctgtcttaacatagaattttgattcatcacagcatcatgtcattgtcaattattgaaatgtcagtgaatgtactattttgaatgaagtaaatgcataggaaccagagtggggaaaatgggcactttttcttaaactcacttgaaaagtagagcttgtagttaggctatgctgtttctataattttgttaactcaagctcaattttatgtctttcatgttgcagtttttcttttttttcaaatatcatactatataaataaaattgaaattccatactagatgtaggcttcagattcgcaatgccttcagttactattgtgggattgtaatgacttttcttgtatgaagagaagaaaatggtctggagtcagtgccagtaactgaattttataattattaacatgtccattatgtgctaatatgactttcatattgataagtaaatacagtttttctaatacttggtgtaacctttaaaataatctctgaaacttacctctgcctccctttaaaactcctgttaatgtgtattctctgcatttgcttacacctttttgagataatgaaccttttcttttttaattgaagtatagttggcttacagtgttgtattaatttctgctgtacagcgaagtgactcagttacacacagacatgcattctttttttaaatgttcttttccattatggtttatcccagatttgatacagttccctgtgctatacagtaggaccttgttgtttgtccattctaagtgtaatagtttgcatcttctaacccagaactcccagtcattccctctccctcccctcttccctcttggcaaccacaaacctgttctttgtgtctatcattctggttcatagatacgttcatttgtgccatatattagattcaacatataagcgataccatatggtatatgtctttctctttctgacttacttcatttagtatgataatctctagtcacatccatgtggctgcaaatggcattatgtcgttcttttttatggcagagaagtactctgtactctccacacaccccttttatttagctgttgatggacatttagtttgtttccatgtcttggctgttgtgaatagtgctgctgtgaacatagaggtgcatgtatctttttggattacagttttgtccaggtatatatgcctagggatgggattgccggctcatatggtagctctgttgttagttttctggggaacctccacactgtttcccatagtggcaacatcagcttacattcccactaacagtgtgggagggttgccctttccccacaccctctccagcatttgttatctgtagactttactgatggtcattctgactggggtaaggtgggtggtacctcgttgtagtttttatttgcatttctttgataattagtgatgttgagcatcctttcatgtgcctgctggccatttgtatgtcttcttgaagaaatgttaaggtcttctgcccatttttcattgggattgtttgactttttgccttttctttttgaatcatttcttagccatccgtagtttctattcatttgaatggtacatagagaggatgatgcaaaatattttaagaattatgattttaaacagcaataaatcataagatctttatgatctattttttgatatatggtataaatagtgattttgatttgctttttctaaaatgatttataagtacattttatgaaaaaatcttgatggttgcatgggataacttgaaacttatgtttttaatgtgcatttgtgcttaaaaaattttttttgtctgtttatgactgtgctggctctttgtgctctgtaggcttttctctagttgtggcacatggggctacttcctagttgccgtgtgcgggcttctcactgtacgtggcttctcttattgcacagcccatgtgctctggagtgcgtgagcttcagtagttgcagcatttgcgctcagtagttgcggctctctggctctagagcacaggcttagaggttatggtgcctgggcttagccactccacatcaggtggaatcctcccagatcagggatcaaatctgtgtctcctgcattggcggttgtattctttaccactgagccaccagggaggccctggtttatattaattaaagagtatccaactactttttaccgtatttccaggttactgatctttctgaaaactatggacaaaagaaattaattttttttagttgctgaggaccatcccttagtaaaattaattaaaagtatgttaatttggcagctggtatactctcttgggctggggggggagaaggaaatgagggtgtgtttaatagagaccattattaatttgactcacctgaaacactaatttatggttttaaattttcattgaaatataacagtatacctgacattttcagtgtctcacattcgaaacaatgtttgctgattattattattactgaggatatctagttttgttaatttgagacatagtgtttgcttgatacctgagtctcaagaaataaggttatttattagctttaaggtaatgacagggatgttacagtgaatatttagttagaaataagctatagagattttgaatcaagaaactatccaataaaacattatgattccctttcagtgcttagaagaaatgaaacgggaagccagaactataaagattgatagaagattgacaggtgccaatataattgatgaacctctccagcaagtgagtttcagtatgtggtatttgaattccatatattgtgtgctgggtgcatttctcttgaaatactaagaagtaattttgctatttatgtaatatgctggaaattcattataatgctattcttggattctctatgtaaacttgctgccttatttatgaacttatttatatgtgtttgctttgtattaaagccttttggttgaatttacattgagaaaaaaagtttttactgacatctgatagtgtttctaattgttttaagagttaaaatgttgctcttcaaaaatttttgctcttcagttgatgactaagctagtggtttgataagtcagaggtttttctactagttttgttactttttaaaatagatattactggcttctttcaaaaatactttaaaaattaaaattattctctcccaaaatattttcattgatgctcaattatatgactattgcaaataatgtgtaccttaaaattctaagtgttattttatagataaacccttatttagtttatctgatttgcagaaaaattatacattacattgtattatttgccatttattgggtaacaatgctgttgacactgtcactggtattagaattaagtgaattatgtcatttttgtcatttgactgtaatgaatctgattatactctcaaataaaacttttttcaagattactaggatctcttgatattattttgcatctcattccatcaaactaactaaaactcttcattgtattttagcattggaaattaatgtttctgcaagctccatctttaacctgaatttgggtagggcttcaccatagataattctttaatttagaaaaaaattaggcagtggatgaattgggctaacaaaataacttaaaattttttgaaatgctttttagcataatgatgctcttgtaatgaagatagttatttactaccacaatttattaggtagagaataaatgaaaatttcaaataatctttttaagttttagtttgccatggttactttttaaatccttaaaaactgtattttttcctgtatttttgttttaggttatccagttttccttgagggattatgtccagtattggtattatacactaagtgatgatgaatcttttcttcttgaaattaggcagactcttcagaatgcactcattcagtttgctactaggtaaggtcactgcattgtatttatgcagaaaaatttaaatattgtttgtatcaatagggaaaataacttttaaatggagggaaaaaattggttattccaaggtaagtagagcagtagattgttattgtgggataactcttagttcatggaactagagccctgaaaagcctttcctcttttacaactgcagaatgtttatctcgactaattgctgttttctaagtctgtatgtcagtgtcttcctccggacccagttgtccaatcatgtgacagttcagagtctttcatcccacttaatgataatgctttatcccctcttacccagatactcttttttttttaattgcaatatcattcttgtattatattgttctggaaataagatttagtacagttaaactcaaagtaaatactgaaccgaggtggcagggccagatagtcagaacgtgattcagaaatctgccagtgaaagatgctcttggacatgattaggaggggtctcactgtcacagaacagtagggcgggggaggggttctgaaacatgaggcagggtcaggtcctgcaccttagacgctgaggagcttggctcagattggtgtaaggaatggtttgtattctgacgccaaccgaccgctagaaacctcagaaggtttttgttcttgttggcatttttaatattaatatttatataaataatatatgaaatatataagtatgtgcagatatagatgcagtgtgtggtgcgcatatatatctgtatatatttgtatgtctgtgtgtgtggtaaaaataaatgtaaacatataaacaggatggatcccagtcttctagaatcatttcctctggagtagcagaggaaatatttgtttgaaccccatgcagtttacatttgtcttctattggaataactagacctctttgacagttgcctggccacagaatagtataggactagtttctggcaacacaagtaagctagcttgttcctccttattggtcacaccttagcatgttcctgccaatctcccactcaggcaggctttagtaataaacaaagcactagcaaaaagatcccagaggtactgcatttccacccccttgaataagtctttgcttggcttagactgagaacccatgccccgtaggtgctggtctgactagattgtatgaaatgagtgggagcaagagacaaaatggctagagcaaaattgggagcccctgatccccacctggagatacaacttaagatgcccacagacttgcagggaagaggtgcagaggaatggagtggcagggctcatgtcttggggaaagcaaggtgtccttgcttggcttcatttaatcggccttgccctgggcaaccagagcctccatgacgccacacatgggctcttcatttcccagggaactgcatgggcttgatgggctgcaagttcttgtgcagtgggaatggtgcagcagctccacgatagcctcttcagagagcccctccccagagggctgatgatgccctgaagcctgatgctaagggatgtattcactaccttctccccctcctccatctgcggaactatttattcattccaaaggggcagaactctatcagttttgtccttcagactttcacaggagggtagctgatggttattgaggtctgcatacctgcagtcttattggtgttgctgttgaagggatggtcaggcttcactggagatggtagaacatcacagcatctccagatctttacctgggcttcttcctgcttggcagcagcatctgccttattgaggctaagtctgcactactggcagccacagttgatcagtggcatcccgtgtagtccagagagtcccaattgcttgcttctgcacatggtgaagcagatgtcagattcataaccattatcttgtagcacctgcatgttgtgcttcagctgctcacgcccactctgcccgtgttgacttctcaccaaccagtgaagccatcctccaggtccatgtactcttctgtgtgggatcagcaccaccttgtagccatccatggcggtggttctgggggatagatggggcgcactgaggttccaaagtcaccccagatagtctgctttattcaagtgctgtgagaagagctcagtgtaactgcccacttatcttaggcacatacctaatggagtcctcttagaagaactcaaaggagcagttggtggagaatattcagtttatttctttactttcagaagagaagtacattttaatgagatttcctttaagaaacttttctgagatatactaaaattctcagtttacaaacacccccttatatattgcctaaatattttggtctgtatccttgtatttactacctgatttttaaggggccatttcatgtgcagaaattatttacatttgaaagaaaggattttatctttgggtaagtttgctatctttttttttttttaatagaagatttttctacccagtacatgcagtgattttcctacaagcctatggcctcaaggcaggaggctacattgctgtgtcacaagtaggttctcaaatctaaaggtgttattctctagccagcccctcttcttccccacttaggttcttgaaatgcacttttgtacttctgagagtcttggagagtagagctttgccctagggctctttctttgtttctgtttctgtctgaatagatatttccagctcatgctgccctgtcaagacttttcttctataattcagttgatcttaaggtttagagtggaagatgaattcctcagcctccggtcactaaggcaggctgcgtaggtttcatagtttgaattttaaccttacttagattggagccccttctcttttatgattaacagcaaatatttggaaagtagccaaccgtaattatgagtgtagatacactgtggaatatagaaaatatattgacatataatcaaagaagtcagaaattggattttatgtcctttagttcgtatatgtaacattattgcatattaggtattgtttaagatcattattctgaatccgttggtcactgctttttatagtaacacctttctaatgacttttccccccctctctgcaaagatgggagtaagaagagttcattattcttttgtctgcctgcttaagattatattagaatataaaaaattttagacctagaaagaattttgaactagtaattggaagacttgagtgagtttgtatcctcttctctcatttagctatgggactgtgagcaagtattctaaattttttggattttggtttttctcatgtgggaaataagtgtcataaatacctgccctgtactgtattcctcacaaggttttggtctggagcaaattcatgtgtacttttaattcatattttgggtctactttgcctcagccagatgctgcagatacagcagtgaatgaagcaaaatccctggtcagtagaatgtaatggaaatagttcatgtgaaaatgttttaaaaattatgaagaaatttagaaatttaggtttttatgtcacccttcacccataatttcacagatgaggaagctaaattacagaaagattaagcagttggtccaagagtatctgttgagttgggggcagagtaagaatcgttcttaacagtcactgtcgtgtcccccagcccctaccagatatactgtgatctagattatcatctgtttcccccacctttctgtcatatcactgcagtgctttgcctgttctttgatcttctaactaccttttctttaaacttcctgttacagtttttcttctcccctctctagcattttattattgttcaattgctcagtcatatccaactcttttgtgaccccatggactgtagcccaccagccccctctgtccatgggattctccaggcaaggatactggagtgggttgccatttccttctctactaacattctatgctttcaggctaaatattgggtgatgtaggaagaaccaagtttcttccatcctagactgatctgaattttgtctttgcttggttgttggccttaagttttgtggcaaattaatcagcctttcttgagctttagtttccttattcataaaaaagctgataatgttacttttgagactgctttcaggctaaaaacgatatgatataaagtctgtagcatatagtgaagctcagttaatgtttgtgccttctcagtgaatgactttgtttttgtctttcattggctttttctagtaaagccatactaaaatatatgtcttcgcagggactccttgactatttccattgagaatatcaagaaaattaagtgcttataatcattacttgaatatttcttgaattcttattcttgtctgctgtgcactgtgaagcgtacattatctcttctctccttcaaatttcagtcttgtagtttttaaccaggggcccatgaagccttgaagatttaagcaaaattttctgtgctttttttttttttcttctgagtggttccatagattttattttcaaaaagggcctgtgaaccccagaaagatttaaaaccaccaaattctagtgttcatatttatttggcaccttgaggaaacaatcacagaatattggcatcaaacaaaatgctaattttgttataacaggaggaaaaggatatatatagagtctgaagttctgcttttgagctttagttttgttatttattaagctctatggcactggaaatagatggggaaacagtggaaacagtgtcagactttatttttgggggctccaaaatcactgcaaatggtgactgcagccatgaaattaaaagacgctcactccttggaggaaaagttatgaccaacctagatagcatattcaaaagcagagacatgactttgccaactaaggtctgtctagtcaaggttatcgtttttccagtagtcatgtatggatgtgagagttggactgtgaagaaggctgagcgccgaagaattgatgcttttgaactgtggtgttggaggaaactcttgagagtcccttggactgcgaggagatccaaccagtccattctgaaggagatcagccctgggatttctttggaaggaatgatgctgaagctgaaactccagtacttttccaactcgtgcaaagagttgactcattggaaaagactctgatgctgggagggattgggggcaggaggagaaggggacgacagaggatgaaaatggctggatggcatcactgactcgatggatgtgagtttgagtgaactccgggagttggtgatggacagggaggcctggcgtgctgcgattcatggggtcggaaagagttggacacgactgagcgactgaactgaactgagctgatggcactggtggtgcagcagtaaagaatcttacctgccagtgtgggagatggtggtttgatccctgggttgggaagatcctctggagaaggaaaggcaacccattctagtactcttgtttgggaaattccagggacagaggaacctggcgagctattatagtccacgggtcacaggaagtcggacatgacttagtgactaaacaacatgaccttgaatggataagaaacataaattctttgcatctagtgataacctgtatctgcttatcaggttgttgttaagattaaatggcatcagatatgagagaatatactgtaatgctaacacgtcatcctaaccttagtacctgtttctagtagcagtttggggaaggaaaccttcccagggagctctttagttctctgtggaacctggacattaagctggaactttaggggttgaatctgtgataacctgtatatttttaattctctcttcaaataggatagcatgacattggagagaaagccctgggaaatctgtattgtaattctacctgtaccattaagttatagtatacttagaaaatttcctaacatatccgtaaaatactgctactgatacttgtcacaaactcttgagttgtgaggggcaaatgagatgatatgcaggtaatatttcataaagtgtttatcaaccagtcagtgatatttttgagcaagttatttaacttatttaactttctgtgcctcaatctcagcatcagtaaaatgaggtaatttcatagtgttgttgtaataattatatgagagaaaagaacatgtaaaacaccataggaatctggcacatagtatgtattcagtgaatgttaacttctttcttgttgtttttgttatttcttacattcctgggaatatatgcacacagattctcttgtcttcttagcttcattgtcttttgagggggaagggcagaggaaacaaaattaaaacacatgaaatagagagaaagtggttatttgggtggtgtttaaaggatttgatctagagatagaatggagcagagtacctgatcaaaacctgatgtggattgaggctaaaactggacttcaagaatgggtgtatagaggtagaggttagtggttgattgtatatttttataattcttacaccatactgttcacccactttaagttgttggctcttagtgtattcagaattgtgcagcctttatcacagctaatttaaggatgttttaatggccccatcaagaaacatggtatccactaatcagtctcttcccatatcccccacaaggcttctacctctaggtagtcaactatatattttttctatgtctttattgacattttacctggatgaaataatatatgatcttttgtgactagcttctttcacttagtgtactgttttcaaggttcatccttgttgttcagttcagttcaactgcgcggtcgtgtccaactctttgtgacccggtggaccacagcgtgccaggcctccctgtctatcaccaactcccggagtttatcaaactcatctccactgagtcagtgatgccatcaaccgtctcatcctctgtcgtccccttctcctcctgccttcaatcttcatccttgttgtagcatatattattacttacgccttttcgttgctgaataattttccattgtatggacataccatgttttgtttatccattcatcagttggtaagcattgggggtgtgtctattttttggtttttataaagcatgctactatgagcattcatgtacatgtttgtgtagacttaatgttttcatttctcttagatgtataccttgaaatgaaatttctgggttgtatggtaactctgtttaatcttttgtggaactggaaacttttaagaagtggctgtccattcctgccaacagtgtatgagtgttccagtttctctgcccctttgcctgtacttgttattgtctggcttttaaagtggtatttcattatggttttgatttacctttccctgatggctaatgatattaagcatcttttcttgtgctaattagttatttgtatatcatgcgcagagaatgtcgttcagagcttttccctgtgttaaaactaggccattgttgactgtactgtattgcttcctggttttataaatacagttttattgtttgattggacagttgtgctcatttgtttgcattttgtccatggctgcttttgtgctatagtggcagaactgactgagatgatgtggcctgcaaagcctgaaacattgctgtttggctctttagaaaaagtttgcatccattaaaatattcaggtcaggtcagttcagtcgctcagtcgtgtctgactctttgcaaccccatgaatcgcagcacgccaggcctccctgtccatcaccaactcccggagttcactcagactcacgtccatcgaatcagtgatgccatccagccatctcatcctcggttttccccttctcctcctgcacccaatccctcccagcatcagagtcttttccaatgagtcaactctttgcatgaggtggccaaagtactggagtttcagctttagcgtcattccttccaaagaacacccaggaccgatctccttcagaatagactggttggatctccttgcagtccaagggactctcaagagtcttctccaacaccacagttcaaaagcatcaattcttcagcactcagccttcttcacagtccaactctcacatccatacatgaccacaggaaaaaccatagccttgactagtcggaccttagtcggcaaagtaatgtctctgcttttgaatatgctgtctaggttggtcataacttttcttccaaggagtaagcgtcttttttctcttactgtttgctattctcacatatttacagattttaacacacctaaaatcatacagtgtacaacttctttgtatacttcttaataattaagaagtattattcaagaaataggaaaaatattggactaaaactcatacaaagaagttgtacactgtatgattttaggtgtgttaaaatttgtaagtatgtgagcatagcaaacagtaagagaaaaaatagtaaaatattgacagtgatctttggattgtggatgtttggctaatttatgtctgatatagaaaaatctaaagaaagaaatgacattttacaaaataggcatgcattattcttgtagcccaagacaggaacatttggtgctcagcactaaaaaaaaaaatatctaggatgacttttttcaactaaatttttttcctgttttttatattattacgagcacataaataaaagaatccttttttcagctatatatgacatgttttgtacagacagccattgtatccttacttccttgggaagttatcttgaaattagtgcttaaatgtggttgtttttgtacataatggggtagtcagtactcaatagattattgttaactgagtttccatttatgacttcttggtaattttttttcccacagaatttaatgtatttcactgttgggtctacgaatgtttcatttatcagacaaattttactgaaaaccatgtttattaaaatacttaagaacatgaatttaatttttagtacataacattatacttaagatgcacacttagccccaggttgttatttatttatctatttttttcatgtagcttaaggtttccagctctgtattttttgtactcaacctctaaaataggtgagtgtgctttatgtgtgtttttctaattttttctttatatttggagattgaaggtctttagaacttctgcattgttgacctctttgaagcattggtgccaaagatgtagaactggatggatttcttatgtggagttgtagttcactgagtaccatttccatactatggttacataaaactgcaggcccagagttttctccatttctaccaatttgtttataacttttatgatcagaagatttcgtgtagttcaaggtgtagcagataaactgaattgaaactcaggaatcctgtttttgttttaatgaaacttttatctcattaactaatctggaataagtaatttatgtttttgatttgtggtaattctttcagatctctttcagttctgaaatactgagattccctgattggttattactaatcttgatctgtttgccttcactcatatctcctcttcaaaacactcacattctttatcacaccccacattttgaataccatttggagagttatttttttagatttaatttactttgggattagtgtacttatctggtctgctgttttactggtagtaaatcttaaagtaggatgatgataaactatacttaaaccttttattacatttctgcatggtcagaaaggatgcaagacttcaaacatttaagatatttactagaccaatcttttccctatagttaagcagttttgtatcaatgaaacttgacagttttttgcttgattatccaaactgctgcttttctctatagaatactaaaacaataaatttgtagttttgtaagtctgctactttaagttcccaccgtggttgattttagctgtgagcataaagtcactgcatgtggggttgggagagagatgtgctcatttggctctccccctgcagcacatggggcttcccaggtggagctagaggtaaagagcccacctgctaatgcaggaggtgccagagacatggattcgatccctaggtcaggaaagatcccctgaggaagtgaatcccatgtgcagaagagcctggcagactacagtccataggatagcagagttggacttgactgaagcgacttagcatgcacgcatgctgcagcccacagggggaggaggtgcagctgagggaagggtgcagactaatcagaaaccataaactagtgaaacttgtgtcctcatggttgctaattgagctcctgtgaaagagtgatgctccatgtatttctgaggattatggtagagagtgttcataagtttaatgtaaatttaggaatgttgtgaaaaaatcagtttaattattttatactcagtccttataactaaattcttgaagtagtttttaaaagggaagcaaagatgctttagggaagtggttatagtaacttgaaatatttataagcaaattgatattggaagaagggaaagtctttaaatggatttagaagcaagtttacaattctttgcttttaaaatgttgctcaaattcaattttaggctgaagcttttgatgctaacaaagtactccctcaaggactcttaaggatggaaacatgtaaaagtttatgtattttaaagagtatatatcctttatgatagtgaattctgagggggttaactgtctgattcagtgactcaaggaaggaatttttttcttttacagataggtcactcacttttggcaaaagtggctgtgagtcaggtgatcataaaagctagtagaatagaacttctcaaaatgtcttcagagatgcttgtcaaaatctacccagtaaaactaggaattttgctagtgattttaaaaaaaaaaagtctgatatttctttagaaggtaaaagacctcatttaggagattaatacatattactgtattttatgcagttggttattatattgcccttattgattaatatatattttaaaagcctttatatgtgataagtgtgtatgacttttgatatatattcagacatatacaaacacgaatactatacagtgtatatactatgcaatatactgtgtcattcttaatgttttaaaataatatcttagtaatcattcctgtgaaaaaataatatagcatcaggaatgaaacatttatcataggattgtttctgtgggaagatcagctgactgttttcattttgatataaaggaccttttccaggacagtgttctggcaagtgggtgaagattgcctctactgcccagaaatcacccacttctttagttaggcaagtctacatgatgactgcatgatcaactacgggttgatcatgctcattcccgtcttttgcttgttcctatatccttactttccctgttaaatggtactcattcatcaatcatgtactcattcatcaatcatagtactcattcatcaagattttttaaattcatcttttaaattcatgacatagcacttaacttctgcacttaattcattcatgacatagcacttaacttctgcttatttctgtgtgtgtgagtatttaaaaaaaaattgtaaactctttttggaatggtacaagttctgtactactgtagtagaaattctctttagttagccagtccattccctttgttacgacatactgactcatgcccgtagcattaaagctaggctgatagactactttcttgtacttctgcccatttctgttcctactttctgagatttaaacttatcaaaagtcacttgtattaatagattcttgggcaaagaaagcttcatataataggtctgtggtatgagctgaacatggatgagcaagacaattgactctgttaaaaaaggaagttgtaccctggttatactttttattataatcatataatttaatttactcctattttgaagaaatatgagtatgacagggcattcctgtgaaaatgaggtcacttgctttggaatttactcagagcaagttgctaaatagattgcagttgaattaggtgtgcaaaagacaactacaaaatactggtgaaaagccttgaaagactcttactctgtgttcagatttgtttacaaatgtccttagttgttctgtcatttaaaagaaactggaaatcataacttcttcagtgtgagaatgatttattcaagacaaaggctacattaataacacttagcaaaatgttaatcaaaaggtcttgtcttggtcttacatcgagtgatttatatgattgaagttaaaatgacatacattcatgattccctcttttgatcagatattttatttacccattatcacttttccatgtactgtgttcctgtgtgcatgtgtatgtatgtgttgtatttgggtaatcatagattcttaaagctgtaagtgtccctagagaaaaaccgtgggatgtgatatgacttgctgaatttcacaactactgaaatggtgtgtcttttacttgaatcaagggcatgtatgccagtccaggcctctttatagaagtctttaattgattttgatgtgtgttttgtattcctgatgatatgctgtatactgcttagaatagatggaaccagtgaagcaattttgtaatctcagtctcagccccatatttgggacattcattgccttttttaggctttagcattaagtagctttaggttttagagagggggaaaagagcttctcaatcaatgtgtgtcctatttcagaactttaaggagtaaggaagaagctattttaggtggttcgtgtggccattctccaggcacctgttaacagtgctctgaccctgaaagagaaatcagtaaatcagtatgtattgagtgcctccagtgtttaacatattatttagccattggggacaacactgtgaataaaaaaaacacagtggaataaaacagatgaaatccctgacttatctcagcaattgaattatttaactgcacattctaagtactctagaactaagcactgtaaccagagatctctcgacctagtgtgaaggagtacagcacagggtgagggtcaatgcagggtgctgtgtgtggaaccaacattttagataaactcgaaagtatacatgggaattgtcaggggaacgtggaggagagaaagtaaatttgtagggagtagacggtgagcaaacttggcagaggaaatagtctgtccagaggcactgagataagaacagaaccaaagaggaaggaagagagcaaaacagacaatgaggaagtaagcagggacccagatatgcatgatcagggagtcattaaagtatttttaaagctcttgttttgtattatcatctttgtatttttaaaaagatcactctagctgctctatggaaaataaaatgaagggagagacaagaaaggacatgggagaccaattaaaagtccaggaataagatgctggtattagaggtgaagataaggcatgcctaatatatatttagagaggtacactttataatttgactgttgcttttattctttgagacttcatttcttatttgcattcctggttaaccattataattcatgcagtcattctatcaagatatataagcttcaggaacctactgtaaattttatttttgggggtagggttggatatattccttattctcttggtcatataggaagtatgctctcatttttaaattcaagaaatgaaagcttctaagtagtaataaaatgaaagtatagataataggattcattgtataataatctagatgtttttactagaagacatgtggggaaatattttaaacaaaatgaaaaagagccttgactgaagtcatgatttaaaaataatagtatcaagaactcaaatagaaagctatttgtagatcaatagaaggaaatgtggctattaaatacattgaatgatttttaaatttatgtttatattgcacttgctatatattagtcatatactgtaattttaggaagtacttcactgtcgacaaaatgttttcaaattataaggtaaatactactagaaatcattagtagatattttcctaatttataagtgggcagtcatgtattactgttcttcttatcttccttacatagaataattcctttgaattgagatttacattaaatttggatgtattcagtgaaaatgagtcaagcagagggaaaataattaccttggacagggaatatgaactgttctgcttcctgttttcctcacctcaatgtatttgtatattgaaagtagaaatctgcatttagtaattaaaataattttttatatttacattattgattaacttccagtcatgttaaatattacttttacatccttttatatcttcttcaaatgtttcatttacatcttcgaagatgtattgagataggttttagaatgccttctaaaattaatgaatttattttgtttgaatttcagtaaattctataacagcactatacctgaaacagaacacatacaatttgaaagattatacttctaaatttgtgaatatgaaccttttatggattaaatgaatttatggtctataccaagtaaattttgttcttatacaaattttcaagtttggatgattttttacaaatattcatgtaaggatttttgaaagatgcttacacagatagtgcttttctctttaaaataagaaacaaagattctagagacctctaagtctaagtatttaagttttatgttgagactgaatattgctatttagtgtattcttacatacatggttcatgtagtctaatgataaccccctctgcaaatctgagagctcaggttacctttatttttattaagttgacttgtatttcatgtacttataatttactttccatgtgtataatacattataattgcacattaaacagtatattaatgttaatactttgtttttatttgaaaacagccatctgtgatattcctcagtgctgttaccacatttataagatttttctccaaaaatagtaatcaaattaacttcagttcagttcagtcgctcagtcgtctctgactctttgcagccccatgaagtgcagcacgccaggcccccctgtccatcaccatctcccggagttcactcagactcctgtccgtcgagttggtgatgccatccagccatctcatcctctgtcgtccccttctcctcctgcccccaatccctcccagcatcagagtcttttccaatgagtcaactcttctcatgaggtggccaaagtactggagtttcagcttcagcatcattccctccaaagaaacccagggctgatctccttcagaatggactggttggatctcctcgcagtccaagggactctcaagagtcttctgcaacaccacagttcaaaagcatcaattcttcggtgctcagccttcttcatagtccaactctcacatccatacatgaccactggaaaaaccatagccttgactagacagaccttagtgggcaaagtaatgtctctgcttttgaatatgctatctaggttggtcataacttttcttccaaggagtaagcgtcttttaatttcatggctgcaatcaccatttgcagtgattttggagccccccaaaataaagtctgacactgtttccactggtcccccatctattacccatgaagtgatgggactggatgccatgatcttcgttttctgaatgctgagctttaagccaactttttcactctcctcttttactttcatcaagaggctttttagttcctcttcactttctgccataagggtggtgtcatctgcatatctgaggttattgatatttctcctggcaatcttgattccagcttgtgtttctttcagtccagtgtttctcgtgattcactctgcatataagttaaataagcagggtgacaatatacagccttgactcactccttttcctatttggaaccagtctattgttccatgtccagttctaactgttgcttcctgacctgcatacagatttctcaagaggcaggtcaggtggtctggtatttccatctctctcagaattttccacagtttattgtgatccacacagtcaaaggctttggcatagtcaataaagcagaaatagatgtttttctggaactctcttgctttttcgatgatccagcggatgttggcaatttgaactctggttcctctgccttttctaaaaccagcttgaacatcaggaagttcacagttcacatgttgttgaagcctggtttggagaattttgagcattactttactagtgtgtgagatgagtgcaattgtgtggtagtttgagcgttctttgacattgcctttctttgggattgggatgaaaactgaccttttccagcgctgtggccactgctgagttttccacgtttgctggcgatgccatccagccatctcatcctctgtcgtccccttctcctcctgcccccagtgcctcccagcatcagagtcttttccaacgagtcaactcttcacatgacgtggcctaagtactggagtttcagcttcagcatcattccctccaaagaaacccagggctgatctccttcagaatggactggttggatctccttgcagtccaagggactctcaagagccttctccaacaccacagttcaaacgcatattgagtgcagcactttcacagcatcatctttcaggatttgaaatagctccactggaattccatcacctccactagctttgttcgtagtgatgctttctaaggctcacttgacttcacattccaggatgtctggctctagatgagtgatcacaccatcgtgattttccgggtcttgaagatcttttttgtacagttcttctgtgtattcttgccacctcttcttaatatcttctgcttctgttaggtccataccatttctgtcctttattctgcccatctttgcatgaaatgttcccttggtatctctaattttcttgaagagatctctagtctttcccaatctgttgttttcctctatttctttgcattgatcgctgaagaaggcttatctcttcttgctattctttggaactctgcattcagatgcttatatctttccttttctcctttgcttttcgcctctcttcttttcacagctattattaaggcctccccagacagccattttgcttttttgcatttcttttccatggggatggtcttgatccctgtctcctgcacaatgtcacgaacctcattccatagttcatcaggcactctatctatcagatctaggcccttaaatctatttctcacttccactgtataatcatatatgatttaggtcatacctgaatggtctagcggttttccctactttcttcaatttaagtctgaatttggcaataaggagttcatgatctgagccatagtcagctcccagtcttgtttttgttgactgtatagagcttctccatctttggctgcaaagaatataatcagtctgattttggtgttgagcatctggtgatgtccatgtgtagagtcttctcttgtgttgttggaagagggtgtttgctatgaccagagcattttcttggcgaaactctattagtctttgccctgcttcattccgtattccaaggccaaatttgcctgttattccaggtgtttcttgacttcctacttttgcattctagtcccctgtaatgaaaaggacatcttgtttgggtgttagttctacaaggtcttgtaggtcttcatagaaccgttcaacttcagcttcttcagcgttactggttggggcatagacttcgattactgtgatattgaatggtttgccttggagacgaacagagatcattctgtcgtttttgagattgcatccaagtactgcatttcagactcttttgttgaccgtgatggctactccatttcttctgagggattcctgctcacaatagtagatataatggtcatctgagttaaattcacccattccagtccattttagtttgctgattcctagaatgtcgatgttcactcttgccatctcttgtttgaccacttccaatttgccttgattcatggacctgacattccaggttcctatgcagtattgctctttacagcataggactttgtttctatcaccagtcacatccacagctgggtattgtttttgctttggctccatcccttcattctttctggagttatttctccactgatctccagtagcatattgcgcacctactgacctgcggagttcctcgttcagtatcctatcattttgccttttcatactgttcacagggttctcaaggcaagaatacagaagtggtttgccattcccttctccagtggaccacattctgtcagacctctccaccatgtgtacttttttttttctcctttattgctcagcatctttatgaatagactctttgccttctatttggtatgttcctaaagggatgaattaattttagtgttaatataaagaaaacagcattgaaaaaatgcttgtttaaaaataccacttaatcaaaagagatgtgtaatctgttttgtatttatctattgaatttgttatgtttcactggtgtgctagattagcggtatttgttgaagtcttcttttataatagtactaggtagcttaataaaattagttaccacctttttcaggggtaagtgtggtattttatacattattctttaaaccatttccaagtgactatagttattttgaatagttgagtttttaagtgtttatatatgcaaacagaaaccaatcaggctcacaccaaaggtatttggttcaaaacttggagtgtataactaaatggaagaatgtggagaattcagaaaggattaagaaagaatcaaaaatcccaagtgctcttttaaaaacaagcaaaagcattctcagttcttaatgtgttgttatgtctgggatgagaagttgcctattgtctttcctttttttttattttaagcacttagtgcttttaagcttcaacacataaaatacttcaaagaatactggttcaagagtttaaatggatttgataaactatggggcttttgaaaaggaatgctaagatgtaatactaattaaatggacaaaatctctgtctgtgatgatcatgttgtttttcagtagtcattgaataaatttatttttgatttaaaaaagtcattcttttatgtaatgtgtttgttataaggtctaaagaaatagactggcaaccttattttactacacgccttgtagatgattttggcacacacctacgagtattcagaaaggcccaacaaaagataacagagaaagatgatcaagtgaaaggtaataatatctttatcccctttgaaaattaggattttaaaatctggttttattattctctaatcttgaattgttccctttctgtccaggtacagcagaagatcttgtagataccttctttgaagttgaagttgaaatggaaaaggacgtttgccgtgacctagtgtgcacttctcccaaagatgaagaaggttttctttttaatttaactttttgagcatattaactgttcacattagtagagtcaagcagaaccattagcagaaccatttaacaaataccagggtaaaatctaagagtaaagttattcttacaggacaggaagcttagtaaaaacactacttttaactcttaaaagtaaatttccagattcttttttcctttaaaaagagctttttcaattaaagagaactacttttgttgtcttttaaaatatagcagacacaaacattttatccttatgaatttactttttttgatctgtagtaattttatcttcatcttgagtttactatttctaattcaagagtacacctattatcataaatattttctaagggaatgatgataatgtttcaaatgacatttatagagttggattgacttttctttttgagaggttagaccagataaattttagctgaggatgttatcttttcctagttttacaataaccgagtccgtgctacttggcatattgttttgattatcagttatataattaccttcccaggaagtgtcagcatatgaacaagtcagaaaagcattgctagttgtggaaattgttttcttagatttttaaaatgtgctcagcttttctatttctttgccttcttttctgttcttttccttttttcttctttcttttttatgtttattatgcaattcagtttttaattgctactactttagcattaatatgaaataaccaaatgtaagaaatagttagaatgacgtatagtgcttttatgtaaatcaagccctcttcaatcagtaaaatagaagagcatattctttttcttattacctgccaagttagtggaggttttttcttggaaaagaattgtaagtatatttttaaatgtgcagataacttcagtatgtagagatgtgtggtagaagagtagaatacttggtgcaactgaaacttttggggaaaaacacttctgtaattgaagtttctcaacaactcaagatgtagggttcagttcagttcagttgctcagtcgtgtccgactctttgcgactccatgaatcgcagcacgccaggcctccctgtccatcaccagctcggggagtttactcaaactcatgtccatcgagtcggtgatgccatccagccatctcatagatgtagggtagaactgggcaaagtaaaaaagtgtgtattactttgattaatgaatatttgctatttggagaataacaaagatttttattgaatactgattaattactaagataataagcttgtataattagcaaactgcttaatcctgccactttgtgttttatatcaagagtaggtggagattttgtattttctgttgttatagctcccttttttttttttaatttctaggattcctaagggatttgtgtgaggtcttattatatttattgctacctcctggagatttccagaacaagatcatgcgatactttgtcagggtaagcttaaacacgtaacaaatacatgactctaaagaaacttagagtagtaattaccaagtttttggtcccaggaccctgttacacacttaaaaattattaaggaccccaatagcttctgtttatgtgggctttgtctatcaatatttattgtattgtaaatattaaaactaaggaattttggaacacagaaatacacaagcatattccattaactatcctgctccattctgaaaatactactgtttgctttcctttcgctacaccctagaggttcctggacaacacctctgttcctaaactgtgcttttttgcttattattatttaagcagtatcaatttagcagtatcctgatagctctctaacttcagttcagtgcactttcaggtagggtaatgatactgtgaaataaatagaaaatgcttgattttgatgagaagagtttgatagattttatacattgaagacttgggctggtcattgtcaacatctggcatgtctatgtctagattcacatttaccactgaaggaagatactgttaatcagtcatcatattcattcatgctgattatttggagcaatctttgcctgtctgatactctgcttaacttttaaatagacaagttgtgtcttcttgctcatccttccctgtgactttaaacaccatccaaatgctaataactttcaaatctatatctttcccttctgaactgtccaccagctgcctactaaaatcatatttcattgatgcacagcccttttaaactttgcatgcacaagatggaagtcttactcttgcctccaaatcctgtctaccttttataagctttttcttcatccccgtaatgaccacccagcaaatgttttaaatcttaagtcctttaaaaagggactgtgggtgagtggctttgtttaacctctctggccttcattccatgccatcactgtattccaaccacacagacttttccaaagtgccgtttctctccactataggattatctcatactcttttttttcatctgcttagaatgatttgccttattcttttggctaaattacatttgtccctcatatctcacttcctcagaaatacctccttctctaaaagccccctcataattccctattagtataggtaggtactgtattccttcttaacatttaccatattttaacatgaaagtttgattgttgggttaacttgcctgatgcctctttcccctaatggaatcccaagccctacaggacaggggccatttcttcatttctgtcttctgtatcactgtgtagttactggttttcacagtgcctgccacataacatataccaatcacataatcagttttaatgcatagttcagtagagttgagtcgttcagtcgtgtgcgactctttgcaaccccatggactgcagcacaccaggcctccctgtccatcaccaactactggggtttactcagactcatgtccattgagttggtgatgtcatccagccatcttatcctctgttgtccccttctccttctctttcagtcttttccagcatcatggtcttttctaatgagtcagttcttcacatcaggtggccacaagattggagtttcagcttcaggatctgtccttccaatgaatattcaggactgatttcctttaggatggactggttggatctccttgcagtccaagggactctcaggagtcttctccaacaccacagttcaaaagcatcaattctttggcactcagctttcttcacagtccaactctcacatccatacatgactactggaaaaaccatagttttgactagatggacctttgttggcaaagtaatgtctctgctttttactatgctgtctatgttggtcataacttttctttcaaggagtaagtgtcttttaatttcatggctgcaatcaccatctgcagtgattttggagccccccaaaataaagtctgacactgtttctactgtttccccatctttttgccatgaagtgatgggaccagatgccatgaccttagttttctgaatgttgagttttaagccgactttttcattttcctctttcactttcatcaagaggctctttagttctccttcactttctgccataagagtggtgtcatctgcatatctgaggttattgatatttctcccggcaatcttgatcccagcttgtgcttcttccagcccagtatttctcatgatgtactctgcatataagttaaataagcagggtgacagtatacagccttgatgtgctcctttcctgatttggaaccagtctgttgtttcatgtccagttctaactattgcttcctgacctgcatacaggtttctcaagaggcaggtcaaatggtctggtattcccatctctctcagaattttctacagtttattgtgatccacacagtcaaaggctttggcatagtcaataaagcagaaatagatgtttttctttattgactctcttgctttatccatggtccaacggatgttggcaatttgatctctggttcctctgccttttctaaatgcagcctggacatctggaagttcacggttcacgtactgttgaagcctggcttggagaattttaagcattacttgactagcatgtaagatgagtgcaattgtacattagtttgagcattctttggcattgcctttctttgggattggaatgaaaactgaccttttccagtcctgtgcccactgctgagttttccaaacttgctggcatatggagtgcagcactttcacagcatcatctttcaggatttgaaatagctcaactggaattccatcacctccattagctttgtttgtagtgatgcttcctaaggcccacttgagttcacattccaagatgtctgactctaggtgagtgatcacaccattctgattatctgggtcatgaagatcttttttgtacagttcttctgtgtattcttgccacctcttcttaatatcttctgcttctgttaggtccataccatttctgtcctttattctgcccatctttgcatgaaatgttcccttggtatctctgattttcttgaagagaattctgctgctgctactgctaagtcacttcagttgtatccaactctgtgcgaccccatagatgtcagcccaccaggctcccccacccctgggattctccaggcaagaacactggagtgggttgccatttccttttccaatgcagggaagtgaaaagtgaaagtgaagtcgctcagtcgtgtctgactgttcaggacccgatggaccacagcctaccaggctcctccatccatgggattttccaggcaagagtactggagtggggtgccattgccttctccatgaagagaacactagtctttcccattctgttttcctctatttccttgcactgatcactgagcaaggctttcttatctctccttgctattctttcgaactctgcattcaaatgggtatgtctttccttttctcctttgcttttcacttctcttcttttcacagctatttgtaaggcctcttcagacagctattttgcttttttacatttgtttttcttggggatagtcttgatccctgtctcctatacagtgtcttgaatctccatctatatttcttcagacactctatcagatctaatccctcgaatctttttgtcacttcttctgtataatcgtaagggatttgatttaggtcatagctgaatggtctattggttttccctactttcttcaatttaagtctgaatttgacggtaaggagttcgtgatcagagaggaaacctaattgaccttgttgctggctatggggcacatgctactgctactctttaaaaattaaactgacttttaggagacaggaatgacgatcagtactgttacatgggtttaaaatgtttaaaataagtagggttgtttaaagaaagagcaaatatggtttgccatagattgctcttttaggcaatatttcatttctttttgcttgagtctaattgagtgaatgtaattgtagagctttgtggtcagtttgtttttctattaacttgatagttctttatcattttcttttgtcgataattaaatgtaggctttcccaaaagacactttgttcagattaaataacagagagttcttaattctttcctttatatgaatcctttgtatgagttgtacaaatcacagcatttgactgagttattgctatttaattgcctctgctttctcccattaccatgttttatttatttaaagattcatggcctcagtgactctgtaacttttaaatcttaatatttgacagcttatgcttgtgttaaagtacatgaaaattatatgaaaattgccacatattttataatatttgcaatattttgctctcactaaaactgtataggaatcattgagtcatatgactaaccaagggcttccctggtggttcagatgataaagaatctgcctgcaatgcaggagacccggtttcgatccctggatcgggaagatcccctggagaaggacatggctacccactccagcattcttgcctggtgaatcccatggacagaggagcctggtgggctatatagtccatgaggttgcagagtcatacatgactgagcaactaaacacacagacacacacatacacacggctaaccagactctttcatgaggcaaattaggagatcagagtagttttcagagacataaggattgtttgccttaactaatatgaagcagtaaacttattccaaaaggttacccatatgttttttactcactttgaaaataaactttcaataaaacacttttttgtttgtgaattttatcattacagaatacatttaaaaatttgagtgtgtgtggtcagatacataatttgagggaagaaattagataaatataatttttttaaagttagagattaaacctgatccagaataagcaattttctaatttgagactggaagattcaaaacacatttcacaaagttagtggagcctccactagtgccttttagaaatattaattgaccatgggataaaagttgttaaagacttgtaaaacttatagaagtagaatttatataaaatatttctctaaaggaaaacaaagtgaaggccctcttctgtgaacttactccagaaaacgacacagataaattagaaatctggaaaggaataaataaattggtcctttacttagaaaagtgaaacatcctgttaaacttgtggctatttagcctttctagtattcataagaaatgctatttcataaatctagatatcacaagcatagaggactgaagattaaacaggtagactattgtctaagtttgaaagtgaaagtgaagtcgctcagtcatttcctactctttgcgacaccatgggactgtagcccgccaggctcctctgtccatgggattctccaggcaagaatactggagtgtgttgccatctccttctctagggtatcttcccaacccagggattgaaccccagtttccccaacattgtaggcggaggctttaccatctgagccacttagttttttatttgcattgtttaatgtttatcaaagtcatgttatatttaagacagtgaccttgagaagataagagtatttttgaagacaggtaagtcttttatctcttttaactaatctctactcacatacaaaaagttcctaaagaactgtagtgtattaagtggaagacacagaattacttaaagaatggtatgtgataaatgccgtaaatacaaagcatgcgtgtattttaaacatataagtgaatagtgttcatcagaacaatcagggtttatttaattggaaaattaattctgtaggcattcctaggaggagagccagaatcttgataaaagtgtaaacagctgcagagaatgagaaggtatagtcaaagaatattaaataattgtgttaccataaatgttattttatttttattatcttgtactagataaatttcaaacaaacaggtatagagagttaatacagtagacatttatgcaccaacaaaccagatttaagcagtgttaacattttgctgtagttgtctaccctcccttgactcccttgaaggcagtcactgttctgatgttatcttttctttttttgtttttatacctttaatatcaatgtaggagtccataaatacatacagtgccatgttttaccttttaaaaatggatataaatgctgactttttagaggtatacttttgctttttttcactcaactgtatttactattgtggccatgtatctaagttgatatagatggcttcatcttattcaactgatgtatgctagctcatcgttttgtaagtcatgtcatttaccaagtttacttttatccataccttaaattgaattaggaaatttacactatgctattgatttgagaagtgtatgtgattaaatttgtttttgtgttttaaaatttttgtccaggaaatccttgcacgtggagttcttcttccattgataaatcaactcagtgatcctgattatattaatcaatatatcatatggatggtatgtactttctaaaatgcagctcttgtttttaaaacagttttttaaaaggtataaatatgatttggaggtcaggatgattaagcaataatttattaaagaaattaagtaaaaatatatctcaaggtaatcttttatattttcaatatttctgtttgcttctgtgttgaatgtactagccagatttcccttaaggaagtaggttgataagataatcttcacagtgttcctgctgtttctacttatttaaatttaaaaaaggatgttttcttatctgtgtgtatggatgataagtacttcttaaaactgctgtttgatttcaaattaatctgaactacttaagtaccatgcaatttaaattttatggtaaatagtagaggaaaacatggagggaaagaacgttagattgagaataagatctaagttctagatacgtttctgtaagttgcttagtatgtcaataagttagataactcatagttttctcattcatcagatgtatcaaagggttagtggttattaagtttgctagttctaattttttttctgattatgtatgcttttcctcagtaaattaatggttgaggaagtgtgtgtaaatgggctattgctgggaattactttggtggttacctaaatctttgattcctttttgtgaatctgaaatttctctcccacattgtcttcttttacctcagtctagcttttctaggaaggaagtatttgattgttctttgtttacaatcatatccattttcagacttgccttttttcattgttgttgctattacagtgtttgtctctcccatcagattatgggtcccctgtaggcagacattgtcttcctagccttgtgttcctagaatctttcatggagttcatagaacttaatttttcatttcctctgtcagcttatttagagtcctgctaggctgtacctaggactttaaaaatttgcatatccccataactgaaagaaaaaaaacctttggttaggaattctgctcctgaaatttatcctaaagtgctaataagcgagattataacaatccgatttaaaactactactggcagtcttgctaataatactaaaaaaagtgaacgcaatataagtgttcagcataaaggcacaattgcactcatttcacgtactagcaaggtaatgctcaaaatccttcaggccaggcttcaacagtacatgaactgagaacctccagatgtacgaggaggatttagaaaaggcagaggaaccagagatcaaattgccaactttcgttagatcatagaaaaagcaaggaaattctagaaagaaaaatctattgcttcattgactaagctaaagcctctgactgtggatcacaacaaactgtggaaagttcttcaagagttgggaataccagaccaccttacctgcctcctgagaaacctgtatgaagatcaagaagcaacagttagaaccgatcatggaacaatagactgtttcaaaattgggaaaggagtatatcaaggctatacattgtcaccttgcttatttaatgtacatgcaaagtacatcatgcaaaatgctgagctggatgcagctcaggctggaatctagattgcctgaagaaatatcagtaatctcagatacacagatgacaccacccttatggcagaaagtgaagaggaactgaggagtgttttgatgaaagtggaagaggagagtgaaaaagctggcttgaaactcagcatccaaaaaactaagatcatggcatccagtcccatcacttcacagcagatagatggggaaacaatggaaacagtgagagactttattttcttgggctccaaaatcactgtggacggtgactgcagccatgacactaaaagacacttgctccttggaagaaaagctgtgacaaacctagacagcatattaaaaagtagagatatcaatttgctaacaaaagtctgtctagtcgaagctgatttttccagtagtcatgtacagatgtgctaattggactttaaagaaagctgagagccaaataattgacgcttttgacctgtggtgttgaagaagactctttgagagtcccctggacagcaaggagatccaaccagtcaatcctaaaggaaatcagtcttgaatattcattagaaggactgatgctgaagctgaagctcccatactttggccacctgtgaagagctgactcactggaaaagaccccactgctgggaaagattgagggcaggaggataagggggtgacagaggatgagatggttggatggcgtcaccaactcagtgcacatgagttcgagcaaactctgggagatagtgatggacaggaaagcctgttgtgtgctacagtccatgaggtcgcagagtcggacaggactgagcaactgaacaacaaaatagaggaataatttaggaatattgatgcaataaatagtctttatactatgatgtctttataaatatgaaaagatgtgtttattttttatgtgaaaaggacaactaaaaatgatgtatgtatagatatctattcctttaaaaataaatatataagtaattatatatttatgaatgactctgattctgataagttgtatactgactgaaatgttaatagagaggtcagtcaattcagttgctgagtcctgtctgactctttgtgaccccatggactgcagcacaccagcttccctgtccattaccaacttgcagagcttgcccaaactcatgtacattgagttggtgatgccacccaaccatctcatcctttgttgtagagaggtaggatcctgaaaattttaagttttctcttttgtttattttactttactacaagtactggttatgtcataagtgattttttaagaagtagcataaaggtaaaaattttaaagcgtttaagtagtaaagtaaaagtaactatctttaaaaagattttttttttgtaatgcaaaaatgaatatcatatactaaccttaaaaaatcagtttacagtactgtataatcttacctatagcacagaacaggatgcaggtttactagaatattatggttatctcacactcatgggattaggaattatttttatttctatttttctttacttttcaatttttattttgctgcacttatattaaatatataattagttacatggtaaaaacatttttgagggacttagcacatactgagaacagaattcaagccaccagatttttacttgttctctgcatagttgggctggtactattattatgtatcatggttggggtctttttatttaaaacagtgattgatcactattgtgctttgctgtaaaatatcaaaaaatatatttaaaagagaaaaatatatcaataaaggatctttagcttgctttgttgtctggcttattctcttgacattattcatgtggaaaaccctttgcacataggtattacgaaattggctcagttcttactctttctgccaggtaaatttcatattaatgagacctaattgtatagtttatttgaaaggaaaagtttagagcagtgtagtagtcacatacatcctccaggtaaaatgttcatattacctaacagaagttttaagtttttaagtcatttctaaagatagtactggccaatttgcattatttatctcaaaatatatattttatatcttttggggacaaactagttaattgtaaactcttctctctgactatgaaatagtttacttaattggtttatattgttatctcctactagagcagattagtgaacagctgtttacttgtttcttaatgtattcttagaaaaatcaggtctttaataacttacttcttttattgttgaagtaaaatttacacaaagtgagagacatcgccaggtagttatctgaagttgtgttataattttgtacttctacttgcactgtttgagaatgtgaagaccaaatttggtctctccacgttctgatagatatttggcattttcattttgttatggttaatttgcacatccttgatgattaatgattttgaatgttttttcaggtgcttattgcccccccttctttttcccacagttctgaactttggcaatcaccagtacttggactcctgtttagaatggacaaccaagttggctaccttttcatagttccctttactgttttatttggcttaaatttattgacagtcatagtcattggatcctttacaacattctcaactacctttcttctctctctcagtttattatttgcttggtgaaaccacattctggttaaatccaacttaatgttctactccattcttaatcttaaatagcaagtggctggagaagaaggatgaaataacagttattcatgttgttacagtgattctattaaatttatgtcagagaatgccactcttatgtttaaaattctccagtaacttttcattccattcacagtgaaagccaaaccatttactaaaccctatcatgtttgcttttcctttagcactcatctgcctttctttggtttagctctagtcaccgtggatggcttccttgctggcatcggacattctgagtgtgctctttacttcacagtgtgctatatatctttctcactttgttaatagtctgtgacccaggagaatttaagtaccatgagtagagagattttcattttgtttgaggacagttatgcctggcccacggtaggtactcaagattctgttttcatttaagtgagtctccctcccatctgttttaaactttattttcagatccgtgattctaattgcaactatgaggcctttatgaacattattaaattgagtgacaatattggagagctcgaagcagtcagagataaagcagcagaagaattacagtatcttcgatctctagatacagctggtgatggtaagtaatttatttaagaataagaatgttttacttctttaacaattactgtatattcaaataaaacttgaatttacctaaatgtcattttatgttattaatggttttcaccttaactgaatctgacttttattattgctaatatgttctgagaataaagcataatagttttctgaatgtgagactcttgttattgcagttatcgctaaagataatttgcatagtttaattttaattaaataatttataaaatttcgttatttattttttaaataattgctgtattcattggttattatgttaaattacagtaagtttatgtttaaagtatttcacaagtaacactgccactttacctcataatcaatttgtttatttttagatatcaacaccatcaaaaatcaaataaatagcttattatttgtgaagaaagtatgtgactcaagaatacaacggttgcattcaggcaaagtgagtaaaatactcttgaattaatatttaactatagataatttctcttcattaaaatatccagcaaatgacaaaaggttgagtattaaccagtgtggcattttacagaagaactaaaaatttagaaaaaaattatattatacaatgtagtgtatttattaaaacaagctaatgagattaaaatattacatgaaaagtaaatttctttatttatgtatttgtctactcatgtgttatttattcaaaattcaacatttattgaattttgtacatcggacaccattttagatggatccaacagatggaaatctctctcatgaagcttacattttagttgcagaatcagaaaataaaccaatacataaattgatatattatgtaaaaaatgtaaaagtaagtgaaacgtgaaaaaataaaatgtaaaaaaagaaaaaagacctaaaatgtgaaagaaaataagtaaagcaaagtagggtggtagagaatgtcacagtggtttagatagatgcagagatttggtaacatttgagcacagagagatctgaataatatgggagaatcctgtgaatttttttttaaatctttcatgcaaaggtgagagcaaatgtgaagtccctggaataggaaagtgcctggtgagttagaggaggtcattgtgactggtatgggaatgtatgataggatttgtagtaggaatgagattagagaggaaccttaggggttagagcatacatggttttgccttccatagtaagatgttttaaaatctgactgtgatagaaatccattggagattcgccctgccaagtgacataatctgacttatgaggtaaaatgattatttgggctctttgtgatgagtagattgtggtggagtggtggagacaagaatggaaactaacagatcgtttacacgactcttgtttttgtttaataagagatgtctggggggggttcatgtgagaagttaattagagacaatatttgctaatgtattaaatatgggttgagagagaaaaaagaactcaaggatgattccagagttttttggactgagcacctgcgtgaatagtgttgttattcactaaaatgaataaaactgagggaggaggaaatttggaagagagaatcaagttttgaatgttttatcttgagatccctgtttgatgttaaagtagacattctaattggtaaattcaagtgcgagggaaatttcgtgaatgaaacaaactttgagaatcctcaggattatcagctgcttgtttaaagttgagagattggatgagattacttaaaagaatgagtttaagaaagaagataccaaagactttgtcctgaggcccttcagttactagtgtttaagacaaagtcaaagatctagccaaacaaactgtaaatgactgttgagattgaaggaaaggagtgtgatatcctagaagcaaagtatagaaaatgctaaaaaaaagtgagagatcaggtgtatcacagactgctaataaatcgagtaagatgaagatttagaattgactgttgggtttgccacaggggtgttgttggtgatccacgagagcattttggtagaatagtggagaaaaaccctgatgggagtcagttataggtagctattgggatgagtttcattgtaaaagagagcagagatctggggcttggaaacaaattttttactaccttcagtttttggtgtagtcaccttttttatgctggttttctattggaaattgatttgtgactctttggtcttgtaattttgcagtgtacttacattccttaaggaacagaagacttatttttaaattttgagtttaatttgctagtttaattataacttacacattatttgaggcctatatttgtcataaatgtgtgtgcaggtgtgtgtatgtccgtctttgttcagttaactatattttaaaatgaatttatatacacatgtaaattcagaatagaagaataatatggtttcacttgtgattgttgtttctttatctagttaccctacctagatcttgagagttagtgatgcttgtgtactgcgagctaaatagcttcagccgtgttcgactctttgcgagcctatggactgtagcctgttgggttcctccgtccttgggattctcaaggcaagaatactggactagatttccatgccctcctccaggggatcttccccaccgagggattgaaccctcctctcttaggtctgttgcactggcaggcagattccttactgctgagccacagggaagcccctggtgatccttaagcatcattatttaagtctgtttgcctaaatactttttgatactgaattccttttaaaatttagaaactttgtttggaagcttgtcaactctattttgaatatgaagctttaccttttttaatagctcaagtcatagcatgtattcctttggatgaaaattcagaatcttcagagatagagtttttttaaccatactgcttatcttaaagtcttcgagatgctttattctttttattacaaataaagtgatagtgaatactcttctccatcccatatctatagagatgctgctggatagaaccaagaagtgataaaatctgaggaagacttatatagggggaatcatatactggtactagattgctttgttgttcagtcgctcagtcgtgtccaactctgtgacctcatggactgcaacacaccaggtttccttgtccttcaccatctcctggagttcgctcaaacccacgtctgtcaagtcggtgattccatccagcatctcatcctctgttgtcccctttttctgccttccatgtttcccagcatcatggtcttttccaatgagttgactcttcccatcagatgaccagaatattagaccttcagcttaaagaacagtctttctaatgaatatttaggatggactggtttgatctccttgcagtccaagggactctcaagagtcttttccagcaccacagtttgaaagcatcagttctttggcgctcagtcttctatatagtccaactttcactactggaaaaaccatagctttgactatgtggacctttgtggacaaggtgatgtctctgctttttaataggctgtgtagctttgtcatagcttttctttcaaaaaattaaattcttttaatttcatggctgcagttaccttccacagtgattttggagcccaagaaaatagtctgtcagtttccattgttttcccttctacttgccatgaagtgatgggaccggatcttagttttcggaatgttgagttttaagccagttttttcactctcgtctttcaccttcatcaagaggctcgttaattctcttcactttctgccattagggtgatggcatctgcatgtctgagattactgatatttctccaggaaatcttgatttcagcttgagcttcatccagcctagcatttcgcatgatgtcatctgcatataagttaaataagcaagaaggcaatggcaccccactccagtactcttgcctggaaaatcccatggacagaggagcctggaaggctgcagtccatggggtcgctgagggtcggacatgactgagtgacttctctttcacttttcactttcatgcattggagaaggaaatggcaacccactccagtgttcttgcctggagaatccaagggacggggcagcctggtgggctgccgtgtatggggtcgcacagagttggacacgactgaagtgacttagcagcagtagcagtaaataagcaaggtgacagtgtacagccttgaaatactcctttcccaattttgaaccagtctgttgtcccatgactgattctcactgttacttatttactacatacaggtttttcaagaggcaggtaggtggtctggtattcccatcttttgaagaattttccagtttattgtgatccacatagtcagaggctttagcatagtcggtaaagcagatgtttttctggatttctcttgctttttcgatgatccaacggatgttggccatttgatccggttcctctgccttttctaaatccagcttgtacatctggaagttcttgcttcatatactgttgaagtccaccttgaaggattttgtgcattaccttgctagtatgtgaaatgagtgcaatttgcagtagattgctttaccccagtaatttcaaatcagtaatctgttgttgttcttacgtgcttatatgaagaggagacactaattacaagaaaagatttttcctcctcttttcaaatcatcggcttttcctttatatatcacctatgcctaatttagtatctgcccctaaataaggcagctgtatctaactttcagaaaatctgtgcatctttttttgaaaatagaggtttgtgagtatggatttgggaatgcagagaagctggtggaaatcatttccagaaacgttggtttttgtggaaagagcatcagactttgaggaagctgactcattctaaccagctttgcaatcataggcaacatttctgaccatcaactttcttatctgttgagtggaattggtgatgcttatccaataggattgctgtgaagatttaatgaagtaatatgtgtgatgcacctagcgcagtgctggacctgtagattctctaaactttgaacctgttagaaacttttttctctgtatatgggtagtttccttgatttgaagtttatgtaatttacaatttaggtagactgaaaagaaacatattttctacaaagattatagactttttacccaattagcaaatctactagttaggaataattttatttttttctagtaggtagacttcaacctctccttgaaaatattgggatttgtttattcttcaacgtaaaagctcctttagtccctatcatgttcatttttttttggaatgggtaaaaatagagaatacatgaaaatacatttaggtttattttttattagaagaaatgagtgcgcattgtgcttttaatgtatatttagtaagcggctcttaaaataactctaagaaattcagtgagctgatactttttattggtaacccacctgtataagaagaaaaaactttattccattttaacttaattgactgtgaagaaagttgagcgccgaagaattgatgcttttgaactgtggtgttggagaagactcttgagagtcccttggactgcaaggagatccaaacagtccatcctaaaggagatcagtcctgggtgttatttggaaggaatgatgctgaagctgaaactccagtactttggccacctcatgtgaagagttgactcattggaaaagactctgatgctgggagggattgggggcaggaggagaaggggacgacagaggatgagatggctggatggcatcactgactcgatggacatgagtttgagtgaaccctgggaattggtgatggacagggaggcctggtgtgctgcgattcatggggtcgcaaagagtcggacaccgctgagcaactgaactgaactgactgaaggatctttaacgtagtgagtgaatagatgagatgttaatctgcaaaaacttttatttgtaggagataaatactgtgaaactggcagcaaactttgggaaactttgcacagtccccctggacagcattcttgtagacaatgttgcactacagttttttatgggtaggtaaatccattttataaaaataatataaccctcaagtttttttataattgtatatattgttaaattttaaatacttgatattaggcatgctagatatatctctctttcattcctcattttctgaaatatcccctattttttttagaaaccatagggatagagatttgtttggttttaaggaaataaatgtttattgcagttccaatgtgcatttgctaatctgcttttaaataaaccctaagagattctactatgaattttaattatttgaaaaagagactatcaggaaagcatggtatatataacctgcttgtatcatttttgggtattaatgggggaagggtcttatttttataccattttatatgtaaatgtttattgattttattcatgttacagaattgcttttatctaggggatgtttccagcaaaactccctgagtctttcatattcatgaacaaaaagaaatgcatggcttattaaagagcccaatccttatttttaatacatatgatataatagtaatatgattaataatttttattggaagctgaatgtggtggagtagtttatttctgatgaagccttccctggcagctttattcccaagaggtgttttcatgaaaaatcagatattttttaaaatgcacttccatttctgttttctgcataattggtctcttcagcttaaccaatttatgatatgacttttttttttaacctccagcattttctaaacatgttcaaaatgcaaagttttaagtatttgaaacttgcaaatattttctttcttaacttgtcttacagctgtatgcactcaaaaatctgtgactttaatatccctgttgttatgaattttgtttggtagactacatgcagcaaactggaggtcaggcacatctcttcttttggatgacagtggaaggctaccgggttacagcccaacagcagctagaagttttatcaagtcgtcagaaagatggaaaacatcaaaccaaccaaaccaaaggtcttttaagagcagctgctgttggaatttatgaacagtatttatcagaaaaggtgaggatatactttgatttatttgaggatacattttgttttcttctttgacagtgtcattaataatggtagattattaataattaaaattaataatgatactgccaaagaagataataatgatttgtagtacttataaacatccattgttcatgctgctatgcacagccgtcttacattgccttgttttatcctgaacatagtattttgtatattattctcattttataggtgaagaaattgattgaattagaaaattgaataaacctgtccagggtcatgtagatgctaaataacagagttaagattcagggtcacacaactttaaataataggaagtaagaggtaaaccttgaaaacagtaactaaaacagagctggagtggctatactaatattagataatagattttaagacaaaaaagttactagataaacaaggaacattttataataggtcagttgatcaggatgataagacaacaaagcccacacatacatgaagaacaaactggcagaattgagggagaaatgggcaattcaatagtaatagttggagacttcagtactccctctcagaaactgataaaacagttcgatagaaaacgatcaaggatgtacaagaattgaacaatactttagaccaattagaccaaatacatctgtagaatacttctcctaacaacagtgttattttcaagcatacacatagaacattctccaggatagatcatgctgctgctgctgcatgttgctcagtcgtgtctgactctgtgcgacccaatggacagcagcccaccaggctcctctgtacctgagattctctaggcaagaatactggagtgggttgccatttccttctccagtgcatgcatgcatgctaagtcgcttcagtcgtatctgactgtgtgaccccataaatggcagcccaccaggttcctctgtccacagatttctccaggtaagaatactggaatgggttgccattttcttctccaggatagatcataagttaggccataaaacaactctcattttagaggcattaaaattacatataagtatgtctgtttctcaaagtagaattaattagaaatcaagaacaaaagggatttgaggaaatttagaaatatttgaaaattaagcaacaaatttctaaataatgtctgtgtcaaaaatgtcagaaggaaattagaaaatattttcaattgaatgaaaatgaaaaaaattatacatcaaaatttatgggatgcagttaaagaaatgtgtaaaggcaaatgtgtagctttaaatgcctgattagaaagaaggatgttacatcagcaatatacattttcatcttaaaaatctagaaaaagaaaagcatgacaaatctaagcaaacagaaggaaggaagtagtaaagatcaaagtggaaatcagtgaaatagaaaacagacaatagtgaaaaatcagtagtacaatcaaaagttgtaaaatgaacaatgaaatttagaaaactttagctcagttggccaagaaaaaaagatacagatcaccagaatcatgaatgaaggagaaagcatcaccactgactatagaaattaaagggactacaaggaaatactgttgttgcttagtcgcaaagtcgtatccaactcttttactaccccatagactatagcctgctaggctcctctgtccatgggatttcccaggcaagaatactggaatgagttgtgatttccttctccaggggatcttcccaacccaggtatcaaaccctgtattgataggtggattcaccactgagccacctgggacgccctataaagaagtattacaaacaactttataacaacagattagacaatttagatgaattggacagatttctgggtatacactaattgtcagactgactcaagaagaaatagaaaatacagtaaatgaatttaattaataattaaaaatcatctttcaaagaaaagcctaaatggttttactagtgaattctatcatatatttcaagaggaaataataccagtatttcacaaactcttccagaaaatagagaaaaaagaaacactttactgttcattttatgaatttagtgttattctcatatcaaagacaaagacatcatttagaaaactacagactgatgtccctcatgaatatggacaataatcctcaagagtcacactccagtatttttaatgactatgctataataccttttaattcatacttattagcacagaattatattttaattttaagtatatatattatttggaaaccacgcatttgtgcacttgcttacatttttgcctgatgaaatatattgtatttaaaagagtacacagttttaagaataatagtacagcaaatgcctttatacactcaattcagctttagaagtagaacgtccattgtattttaaagggcttcccttgtggctcagctggtaaagaatccacctgcaatgctggacacctgggttcaatccctgggttgggaagattacttggaggctacctactccagtattcagacctggagaattccatggacagtatagtcagtgggtcacaaagggttggatatgactgagttacttatctgtattttaaaagatccctatgttagcctttgcctgtccctactttcttgctttctgatgaagctggttttctctaattgttcacttactttcccatacagttttcctgtacctgtatgttctaaataatactactgcttcagctttatgagattttgacattacaaaaatgtcaggagagataactttagacatttgccttccagatggctgtcattgttgccagcagtagaaaagatgccattgttggcagtaatcatattttttttagcatgggacaagaataatatccatctttcatttgaaaatatatcaagaatgtgtacggtgaaaagaattatagtaaacaaatttatatgatttttctctaaaactattgaatgatttttgaagggactaaaattaaccttgaaataaatgtacagaactgagtacatgtaggctatagcaagaactcatacaatgaagaaaataactcatttttttaaaataaagctattgagaactcagatatcaccagaaaggaacagccagcttaaacacagtttcctcactctctttaataaaactataatttctttggaatgctcctttattctcacacgtttaaatgatctatgtgttttggaaccattttccttgaaaaggagaggttgttaacttatgacatcctttatgctttgaagtacttaaaaaatgggcatttcgacatgggcagcctgtatgataaattcatatatgcagagaacctgattgacaaacacctggtctaccaaacctggagatacaaagttgatggacactttttgggggaaagctgggaacaaatccctgtaggtctaaaaacctgctgtttttagtgagtaaaatcccattattctttgcctaaatgattttattgaaaggatatttcacttgatgtcatgacattgcagtggtaagagaaataaatgtgataaaggctcaagatcagagctgaaagtcatagtgaattttattttatagttgattgtatttagttataccactgtataaagggttgtcctgaagactacaagcagatcagaaaagtattgtttaaaaaggcacacaaaaatacactacaagatcatagaataaaaggtaaatgtaattgtttattttttattaaatataaatgtatttattagtcctgttatgtctataatcttttaaaaagtcttagatatatatattttaagaataaacagtggtactgcctaccaattttaaatttaggtaaaaagtttaaaaaatgttaaaataagtttctgtatcagagaacataatattattaagtaaattgttttgttttctcagacatattttttgattagtcttattaattatcagttgccactgttaactagtcattttgtttaaataactacatttgtgtaatatggaagtaaacaatacagattaatagataattttggaaaaaacatgcagttttttgtatttttatgttaaagtagtatcatatgtgcaaatatgtcttctgtattactgtggttttttgaaaaagggacttggttagttatgcccaatgttagctctctgaaagtattgcttgccatacatattccaaggataaggcttaatccaattctgtgtacctgagattatagaaaaaattaagctagataaattgaaaatgttattttccaaatttgtctctatttcctagaaactaagtttagtgagcccagagggcacatgaaaggacagaaactcacttaaatcatgttcctctttgatctttgtcacatagttgaagctgttgagttcttctgttcttcagggttggggtgggggagggaacaccacacccatacacaaacaaataataggtaagtgtccttttcttcttcctccaaaaagcccctcacaagaaccaaaaaagtaccaccacactacctccctgagtttacttctaagagtgttgaattaacaaggggacattagaagttgtatagcccttatgctgcacattcataccctcctgtttacttacttaaaattttttttaaattttgttcaagaatggttgatacataatattgtgtttatttctgctgtatagccaagtgattcatttacacacatacacattcctttttcatatttttctccattatggtttttcacaaagtatcgagtgtggttccctgggctatacagtaggaccttgttgtctatcattgtatgtatactagtttgcatctgctaatcccaaacttccattccatctctcctgcatcctctctcccttggcagtctcaggtctgttctctgtgtttatgagtctgtttctcttttgtgaagtgaagtggctcgactctttgcaactctgtagcctaccaggctcttccgtccatgggattttccaggcaggattactggagtgggttgccatttccttctccaggggatcttcccgacccagggatcaaacccggatcccccgcattctaggcagacgcttcaccgtctgagccaccagggataagttcatttgtgtcatgttttacgtcgtgcgtataagtgatacggtaatttgtctctctctctcttacctacttcggttagtatgataatctctaggtctatccatattgctgcatatgacttgatttcattcctttttatggctgagaaatactccattgtatatgtaccacatcttctttatcctttcatctctcgttgaacattgaggttgtttctatgccttgggtattgtgaatagttctactttgaacataagagcgcatttacctttaaattacagttttgtctggatgtatgcccaggatacttacatactttttcttctcttcttgatttatctattctgttccatagatagtctaacagatagcatagcgaaattgcttaaacagtgcattcttttggtactgtctctaaaagttaccatcatttaatcactcatttattctccatagccttcagacttaaaaatacaaaagttaacatgctgaggaatgtctgtaatatctgtcacattatgcaccttgagatgaaagttattgaaacaaagtaacttttcagatttttttctgtcccttctcatgctgatactttgctgcagtattataaaactgaattaggataaagatagtctattttaagtgccattcaaaaggattgtttctagtgttaaatgataagtagcaacatggcatactcttttgacattttattaaatacacatctaagactactgagtgctcaacactgactcatggtgacagtatttcctatgtgctggacacataagtcttatgtaaatctcttttcatcctcacaataatcatatgtagtatttatctccattttacagattgaataagtgaagccttgtgagaggaaacttgctcagcaaaagttaagatttaaatccatgtttttctaacaagtctactgtgtagtacctcatggccagaaaaatgctagctctgatttcagcctttaaacatcaacgtgtcatttactacccaaggattttttggcagttacttttagtactatgattccattaaattatcctactttggcttcctgatgcgaagagccaactcagcagaaaagaccctgatgctgggaaagattgagggcaggaggagaagggagtgacagaggttgatatggttggatggcatcgctgactaaatggacatgactttgagcaaactcagggagatagtaaaggaaagggaagcttagcatgctgcagtccatggagttgcaaagagtcagacatgactgagtgactgaacaacaaattatttaattctccaactatgaaggcttaacttgtatttagaaatttcaaagattaacgatacttgtgtttttctgtttgtcaggcatctccgagagttactgttgatgattatttggtagcaaaattagcagatactttgaatcatgaagatccaacccctgaaatctttgatgacattcaaaggaaggtattatgtacaacatttatcattatatgttttttgaaaacaatgtgtatgtctatatgcatgtaatttgtctgtaaaaggttattgaaatgttatgaaagtacagtgtgataactaaaaaagatgcgttatggtaataatacttcacaaagtagccagtttttctttgcttatttactgtagaaatgcagaaaatccctatgctaaattatttactttgaatctggctgaagtgacagatacagattctagaatttatgaatagatgatgtataaataacagattcatttattttgatatgtgccttgagcctttatttggatttgtttcttagagaacactactttgtagaccattatatataactgctgtcatgtgacttgttttgcagtaggactctcttcagtgtaacttagatgctagaggggccaggaaaatatcactagttttgacatagtcttattactgacatcctataaataaggagcctataattcattacagtaatacctctgtctagcttttgttgaaatcttattagtggaaattagtacattatttgtattaatgatcgaatatcttgatttatttcaataaggtatatgaattgatgcttcgagatgaaagattttatccttccttcagacagaatccactttatgtgcgcatgttagctgagctggatatgttaaaagatcctagtttcagaggatcagatgacggtgatggaggtaagatggcacacattatacatttatcagtgtatatatgtatattcctgcatatattctgctttccaaaggaaatcctttcaaataccataaaattgttcttaaagctgaaatataaattgtaatatattttaaaatctatgaataaatgatgaagtttacttactatactaaattaaaatgttaaaatctgataaaaattagaacataactgttgagcctagaattcctttttttttaaatatattttttaattgaaggataattcctttacagaattttgttgttttctgtcacacatcaagaatcagctataggcacacccatgtcccctacctcccaaactgcctctcatctccttcctcatcccacccttctagattgttacagagcccctgtttatgagttttatagcaaattcccattggctgtcttattttacatatgatgttgtccatttccatgttactctctccatacatctcaccctctttcctcccctccccctgtatctataagtctgttctctctgtctgtttctccattgctgccctgaaaataaattgactggtaccatctttctagattccatatatattcgttagtatacgatatttatatttctctttctgacttacttcactctgtataagcagctctgggttcgtccacctcattagaactgactcaaatgcattcctttttatgactgagtaatattccattgtatatgtgtaccacaatgtttgtatcagttcatctgtcgatggacatctaaggttgcttccatgttctagctgttgtaaatagtgctgcactgaacgttgggttacatgtgtctttttcaattttggtttcctcaaggtgtatgcctagtaatgggattgctgggtcatatggtggttttattcctagttttttaaggcatctccttactgtcttccatagtggccgtgtcagtttacattcccaccagcaatgcaatgattcccttttctccacatcctctccaacatttattgtttgtagactttttgatgatggccattctgactgttgtgaggtgatatctcattgtagttttgatttgcatttctctaataatgagtgatgttgagcatcttttcatgtgtttgttagccatctgtatgtcttctttggagaaatgtctgtttagatcttttccccactttttgattgggttgtttgtttttctggtattgagttgtatgaactgcttgtatattttggaaattaattctttgtcagttgtttcctttgctattactttctcccactctgagggttgtcttttcaccttgtttgtagtttcctttgctgtgcaaaaaacttttaagtttaattaggtctcacttgtttacttttattttatttccattactctaggaagtgggtcatagaggatcttgctttcatttatgtcattgagtgttctgctacgttttcctctaaaagttttgtaccttctggtcttacatttaggtctttaatccattttgagtttatctttgtgtatggcattaggaagtgttctaatttcattcttttacacatagctgtccagttctctccgcaccacttattgaagaggttatctttgccccattgtatattcttgccttcttagtcaaaaataaggtacccatatgtgcatgggtttatctctgggctctctgtcatgttccattggtctatatttctgtctttgtgccagtaccatactgtcttaatgactgtagctttgtactatagactgaagtcaggaaggttgatccctccagctccattttctttctcaagactgctttggctatttagggtcttttgtgtttccatatgaattgtgaaattttttgttctaattctgtgaaaaatgttgttggtaatttgacaggaatctctttgaatctgtagattgcatttagtagtttagtcattttcataacatttattcttccaacccaggaacttggtatatctctccttctgtttaatgttgtctttgatttcttttatcattataattttccatatgcagttcttttgtctccttcagttcagttcagtccctcagttgtgtccgactctttgtgaccccatgaaccgcagtatgccaggcctccctgtcccatcaccaactctcggagtccacccaaacccatgtccattgagtcagtgatgccatccaaccatctcatcctctgtcgtccccttctcctcctgccgtcagtctttcccagcatcagggtcttttcaaatgagtcagctctctgcatcaggtggccaagtattggagtttcagcttcaacatcagtccctccagtgaacacccaggactgatttcttttaggatggactggttagatctccttgcagtccaagggactctcaagagtcttctccaacaccacagttcaaaagcatcaattctctgcgctcagctttctttatagtccaactctcacatccatacatgaccactggaaaaaccatagccttgactagacagacctttgtttgtaaagtaatgtctctgcttttgaatatgctatctaggttggtcataactttccttccaaggagtaagcgtcttttaatttcatggctgcagtcaccatctgcagtgattttggagcccagaaaaatagtcagccacggtttccactgtttccgcatctgtttgacatgaagtgatgggactggatgccatgattttagttttctgaatgttgagctttaagccaactttttcactctccactttcactttcatcaagaggctctttagttcttcttccctttctgccataagggtggtgtcatctgcatgtctgaggttattgatatttctcccggcaatcttgattcccgcttttgcttcctccagcccagcgtttctcatgatgtactctgcatataagttaaataagcagagtgacagtatacagccttgacatactccttttcctatttggaaccagtctgttgttccatgtccagttctaactggttgcttcctgacctgcatataggtttctcaagaggcaggtcaggtggtctggtattcccatctctttcagaattttccacagtttattgtgatccacacagttaaaggctttggcatagtcaataggtaggtttattcacagaaatttcattatttttgttgcagtggtaaatgggattgattccttaatttctttttctaatttttcattataattatatagaaatgcaaatgatttctatgtattgaccttgcatcccatgactttgctaaattcattgatagctctaataattttctgatagtttcttttgggttttctatgtatagtatcatgtcatctgcaaatagtgagttttatttcttctttttccaatctggatttctttatttatttttcttattgccatacctaggactcctaaaactatgttgaataatagtggtaaaagaggacacacttgtcttgttcctgatcatagagggaatgctttcagtttttcaccattgagaataatgtttgctgcaggcttatcatatattgcctttactgtgttgaggtaggttccatctgtgcccattttttgaagcgtctttgtcagagatggatgctgaattttgtcaaaggatttttctgcatctgttgagatggtcatatggtttttatctttcagttttttaatatgatgtatcaattgattgattgatttatgtatattgaagaattgttgcatttatggagtaaacccaacttgatcatggtatatgagctttttaatgtgtggttgaattctctttgctagaattttgttgaggacttttgcatctgtgttcctcactgatattgacctgtaattttcttttttgtgtgttgtctttgcctcgttttggtatcagagtgattgtggccttgtagaatgagtttggaagtattccttcctctgaaggttttttgaagattttcagaaaaatagacattagctcttctctaaatgtttaatagaattcccctgtgaagccacctggccctgggcttttgttttttgggaaattttggatcacagttttgatttcattgtttctaataggcttgttcataatttctttttttttcctggttccgtcttgggaggtagaacttttctaagaatctgtccatttcctctaggttgtccattttattagccatatagttgctcataatatcctcatatgatcctttgtgttgtctgttgtcacctctactttttcatctctaattttgttgatttgatttttcttcctttttttcttgatgagtctggctgttgggttgtcagttttatcttctcaaagaactagcttttagttttattaatctttgctattgtttccttcacttcttttttatttgtttctcctctgatgtttatgatttctttccttcaactgactttgggattttttgttctttttccagctgctctggacatagacttaggttgtctatttgatgcttttcttgtttcttgaggtagaatttattgctataaacttccctccttagaactgcttttgctgaatcccataggttttgggttgtcatgttttcgttgtcatttgtttttaagaatctttaagaaatcttaatggttaagaattttttctccagtaacctctttgttatttagtaacatattatttaatctccatgagtttgtgttttttgcagtttcttttttcctatagttcatatctagtctcatgaaattgtggtcagagaagatacttgatacaatttcagttttcttaaatttactgaggtttaatttgtgacccaaggtgtggtctgtcctgaagaatattccatgtgcccttaagaagaaagtgtatttttctacatttggtggaatgtcctttgaagatatcagtgaggtccatttggtctaatgtttcgttgaaggtttgtgtttccttactgattctctgttttgatgatctgtccatcagtgtcagtgcggtgttaaagtccactactattactgtattactgttgatttcccgtcttactcctgttagtgttttccttatatatatattgaggtgctcctatgttgggtgcataaatatttacaattttatgtcttcttcttggattaatccattgaacattgtgttgtgtctttccttatcttttatagtattctttattttaaagtctgttttgtctgaaatgaggattgcctctctggctttctttaggtttccatttgcatggactatctttttccatccttttactctcagtctatgttactgtaggtctgaagtgggtctcttgtatgcagcatatatgtgggtcttgtttttgtatccatttagtcagtctgtatcttttggttggtgcattttatctgtttacatttaaagtaattatatacgttcctgttggcattttcttaattgttttgggtttgtttttgtaggtctttcttttctcttgtgtttactgcgtatgtaagtccatttactatttgttgtaaggctggtttggtggtgccaaattctcttaacatttacttgtctgtgaagcttttgatttctccaattttgaatgagatctttgctgggtaaagtaatcttggttataggtttttttttctttcagtactttaaatatatcctgtcattcccttctggcctgcagagtttctgctgaaagatctgctattaagcatatgggttttcccttgctgcttttaatattctttctttgtatttaatctgtgttagctttattaatatgtgtttcgatgtgtttctccttgggtttgtcctgtaagggactctgtgcttcttgaacctgattgactgtttcctttcccatgttggggaagttttcagctataatttcttcagaaattatctcagtgcctttgttttttcttactcctctgggattccctgtaactccagtgttggtgtgtttaatattgtcccaaaggtctctgaggctgtcctcaatttttttcattctttttcctttattctgctcttcggtagttattttcaccgttctctttcagctcacttatccattcttctgcctcagttattctgctattggttccttctaaagtatttttagtttctgtaattgtgttatttatacctgtttggttattctttatttcttctgtgtccttggtgattgtattaactgtgttaattacttcttggatcttttccattctatttgaaagtctttggagtatctttactgtcattattctgaattctctttcaggtagattgcttatttcatttttgtttatttggtcctgtgactttctgtcttgttctttcatttgtgctgtatttctctgtcttgtcttttctttttttcttttttctaacttgttccactttcccaggcttgagggttatattccttcttcggtttggttttggccgttggagggagaggttgttggtctgagtggcttgcattgacttcttattaggggtgattagtgtctgtgttctagtgggaggagatcaggcaggtaggtaattacagaaataatggggcatgtacattcacttccacacatacagtcgtaatgaaagcattctaaagaaaagagtgcaggagatagacttggtgaacaagggaaaccaaatgtgatattgatcaattaaaagcagagctaactaatgttcaatctggaaaactgagcctaagcagattgccaactgaggaatatagcaaagagagcacaagaatttaacttacatagtgaagaaagaaagagtaaaggaaaaaagggaaaataaaagaaaagcagagggagagaaaagagaattttcctttaaattcttgaagcatgttttcaaagggattgtcaccccaatatttttatgatagtttcttttttgcttgtaagtaataattgtcatgattaatgataggatcattgagaagattaaatgagataagaagtgatgattgaatgtcccataaactataaaacattataaaaacatttttttctgtttttaattctactctgttccaaatcctgtataagacagaagaagctacaagagtcgtttattccaatctttcagttttcttctgttcacattgtatagtgaagaaaacagactttaagagtgataacactttgattttactccttttctactacctattacctatgtgatgttggccaaacacttaatttctttaggtctcatttaatattctcagttataaatgtagactaatattcttatagtaatatcctacctcaaagttgtcatattttaatggaattctgtatgtaaaaatgatacataaactaaaacacaaatatcggtttttcttcatagtaaataactggctgcttaagaacaatgcgagaggcaacccttagacagtttgcagactctgggcctgatgacctgttttactagtgattcagtgcagaattacttattaaactctaatgaaatatctaggatttgataaactttctagcaaataagcaatgtaaatacaaagtaaatgggaaagactttactaagtatttaagagagtgctttaattttgctcatttacttataaaatagagttaatggacaggaccacttaaagttggagatataatagatgtattaagtggttagcactgctttagcaaatgcctctgttttggaagctctctagcctcccctcttttctacccatcctccccactccttattctatattagtgagactttactttttaaataatataagaaatatagttataaaaatttgtatgttacagtagcttttatattgattgttgatccagtatcttggttatttgtaaaactggaatattattctgttaactgtatttgattgcttaatggagggggttttctgtttttaagaacacttctctgggagctcagtagtaaaatgcagtgtacttcgagtttattatatattttatctatttactatctctgttgaaaaatcttttacagagctgatatgaaatttgtagtagaaactctccttccttaaaggactatcccattgtatattttagttttgtctactttagaaatttgctcagtgttgtaaaatggaattgctatctgacccagaaagaaagaagataaattgaatcataagcagctaatttataatcatctatgtattatataatgatcatagtagcaatatattctgtgggagtggtttttatcctgtagtataaaaactcttctggaatcttctaaactgacttttagcttccatttatatttgtcttgtatatgactgatggaagcaaattatttatgtgatctccaacttcccaaaatgtcatacttacttaaaacacaaagtagattgagactttttttttctgtagctgattttgatctgaatcaaatggactctttaatgtcagtcattgagtagtccctcacattggaatcatcttgatagtagtttggaattaatatatacacatacatcttttgtccgtctgggacattgctttttaacattccatgtcctaattaatgagctcttacatattttataactgagaaattgcctaatacttttttgaaaccatgttaagtatatggaatcatggatataatttgaaacatttttattaaaaatggggttatgtgtatttgtcagtgtttaggttttaggcatttgctacaagtgcttataattttcttgtttgtataggattgtttaattaaaatagacattatattttctggttataaattcattttctgacttttaaaaattaagcttcctgatactttgtgtattttttaaagtcctgaaattccggctgctttttagacattttgaaataatgatcagatctagtgttcaatgtgtgctgcaccccgcccccactttttctttatgtaggttaattgaacacagagttagtgggtaaagtcttaccatgtataatagtatcctgcggtagtttttctttgttttagaagaaatttcattcctgtttaattaaatttcattcttatttaactaaacttctgtaggtaggtaggtagctggatggcttgcttatccatgctctctctcttccctcttccttgtctttgtcctgagattgccttctttagttagtttagctctaagtaattttcagggtagatgttttttcctttattaaaacaaattcacagacttataaatatttaaattatgctttcccttttaaatgttaatttcaatcacatttttcctcatcatgtgaaacaatggcttcttttgttttctaatatctttaagcagttgtaaaggtcttgattaaatatagatctccattggctatagacagtctaaatttctgaatctcattgttaagcaagaaactaaaccatgccttgttttgctccgttgttcttgtttggttggtaagttttgacttttttgcaactacatgggctgtatcccattaggctcctctgtccatgggatttcccaaacaagaatactggagtgggttgccatttccttctccagggaatcttcccagtccagggatcaaacccatgtctcctgcatttccaggtgggttcttgaccactgagccaccagggaagcccctgttttgctcctagattttcttttaatttgacatgtctttggtgggaagacttaagaagtgggcagaccaaagaaggtaagaggcatataattgaataaggaggatagagaactattttttttatccattttaattatcctaggtggaatttcctatttttgtgttcagaggtttgaggaactgagaaatgttcttggacagttagaggtgttgaagttggaaggcaacgccagctgcctctggcaatagtaatagaaatttcctttgaagacacatctcgagatccaaactataaataatatctgagctaaagcctttgactgtgtgtatcacaataaactgtggaaaattctgaaagagatgggaataccagaccacctgacctgcctcttgagaaacctatatgcaggtcagcaagcaacacttagaactggacatggaacaactgactggttccaaataggaaaaggagtacgtcaaggctgtatactgtcactctgcttatttaacttacatgcagagtacatcatgagaaaccatggactggaagaaacacaagctggaatcaagattgccaggagaaatatcaataacctcagatatgcagatgacaccacccttatggcagaaagtgaagaggaactaaaaagcctcttgatgaaagtgaaagaggagagtgaaaaagttggcttaaagctcaacattcagaaaacgaagatcatggcatctggtcccatcacttcacggcaaatagatggggaaacagtggaaataatgtcagactttatttggcgggggggggctccaaaatcactgcagatggtgactgcagccatgaaattaaaagtcgcttactccttggaaggaaagttatgaccaacctagatagcatattcaaaagcagagacattactttgccgactaaggtccgtctagtcaaggctatggtttttcctgtggtcatgtatggatgtgagagttggactgtgaagaaagctgagtgccgaagaattgatgcttttgaactgtggtgttggagaagatcttgagagtcccttggactgcgaggagatccaaccagtccattctgaaggagatgagccctgggatttctttggaaggaatgatgctcaagctgaaactccagtactttggccacctcatgcaaagagttgactcattggaaaagactctgatgctgggagggtttgggggcaggaggagaaggggacgacagaggatgagatggctggatggcatcactgactcaatggatgtgggtctgagtgaactcagggaatggtgatggacagggaggcctggcgtgctgtgattcatgggtcgcaaagagtcagacacgactgagcgattgaactgaactaaactgatatgctacacgccatatagtaactaaactgtttatgaatattgctttgctgtatattcctttgtgttttaacagagtgatatcttacttggtaacttaatttgatcagatatatactctatatctttatactatatttcctttttccgaggaaaaagatattttaataattactctctaacattaattttaaaaaataatttctagttgatttttaattaaatgacattactcatggaattttatgtgtcttttcttctactaattgtatattgatttaagaatctagacttcagcatttttgatgcagatcaaccgtgaataagtgaactttataggtttaataaacaactttttatctttcatattaaagaataattttgtttgtaatattaatccagtgagacagaagtaacaaaatgcctctgacatttcctggtgtgaaatgtcattcatttcaaatgacaatttcaaatgtcatcctgaagtgtttacctcatgtttatatttatattagacaacttaatatgatactatgagaataaaatatataaaatgcttttttttggtacataaatgccttttgctgggggggggagacaacttaggtacaaagctgttttcactgaaacaacctggcttagaaaaccatgaacacaggtgtttgggaggagcgtaccacagttttcttcattgttctctcttggcttctgtggctttcattcttaggcttgaaccttagatagctaaagcactgttcaaagagtttttgactgtatactaagttgaattttccttctcacagaatcttttaatgggtctcctacaggaagcataaatttggtaagtactgttatgactactttaattcttaaagtggcctgaaaataatatgaaaaactgagccttaacatatgtaaataaatgatacattagaaccctcaaatcatcctttataagaagctgttgcacttctatagaaatattaaattcacatataagggatctgtggattagaacttaatgaaatgaagtttattttctttttaaaaatgggtttaaatcacctgcctgatttagttgcaagtgataataatgatttcattattttcaacctcagtatttaatatttcactctgatcagtgctatgatgggcagtaaatttatgacacataaatgtttacgttagaattagttttttcttcttgtaattagaaaagaaatataaaactggttgggatgcctgaaaacctaaagatatttcttaaggtccatactaacaagttcaggatattgaaaaaaaaaaagttttttttaagcttagaggattttacaagaattaagcaactgtattccatgattacaggtttaagaatgacacatttttagcgtataaacttcactggcatttcatatattcaaggtgaaatgtgaaataatgaacacttcagttctcttatatatccatgcttaccattgaataccttgttttcataaaatgctactagggatgtgctttagtgttgtgtgcaagtttctgtccagaatttgttgaagatggggagagattgtttgctttgttttccattctactacctacatgactttttcttttgaactttttgcaatagataagtagttgagaggtccattgtcttatgttccttagtatgacatttatttctaaaatgaccttattgtataaatgttccattattgtacaacgtatgctgctgctgctgctaagttgctttagtcgtgtctgactctgtgccaccccataggtggcagcccactaggctcctctgccgctgggattctccagtcaagaatactggagtgggttgccatttccttctctagtgcatgaaagtgaaaagtgaaagtgaaggtacaacgtataacctttaacaaaacactaaagcaaatcagccatagtgttatgtcagatattttgtaacattttaagtattttcctaaattctttggtatcgttatcgtttgcttctaatattccatagagttatgacaaaaaggaatagcttctggagactgaacagtgttagcaatataatgcccattaggaagaaaaagttgccaaatatgatgaaacttttccttgcattgaaattttttagtattcatgtttttagttcttgtaagtgtttgaacactattaaaaaatatttttttcttcattccctatctggcataaatactttttcaaataaaagagattccttttatcatatagtgatataaagcataacagtctgtgaattaaaaaaggtgacacttgacatcagtgacttacagtttttgttttcacacaaatctgttaaatccaagcttttaagtagctggaatcttttggattctttttttaaatacatagataaatttgaataaacagttgcattttaaaaatagtttgattacaaaaaattgttcttaagactgtttttcatatttaatgaagataatatttattaattgtataaaaattataaactgatcattatagtttattccagcaaactaagcaaagaaaatatttaatgtggtggtttactcattttttgattgagattagcacacagattataagcattttcgaagtgccattgtagttccgtttgctgaattgattatcatagtaaatttcaatttttggtttttatcctagcataatgttacagaaaacacttctttttttggcaagaagttcaagaatcttaacccatagtcactttgcaaactgtgttttatttcaggagaacattagtgcacttgctttgaaatcacagttttctttgattaatcagttcttatacttctaaatcacagtgtggttccatggttataatgtcatcagttgtaactttatatagtctggttgatatttacacatgcgtgataactgtgactaatggttaagagacatttcattgaattttttccatcatacttaatgcaaatattaattgcatattttacatgtgctagaaaagacatttatatacagaatttttcaacagcttctggcttgcatagtataagatgctaatatggttaaagtaataagaaaacagcatataactttttatatgtttacctacaaaggaaggttaccagtaaataatgcttttttgaaaaaagtgattgttttatattccctgtgctagcttatagttagaagaagattacagtagataacaattttaaattttgtagaatattccatttcctttggggttctatctttcatgtgaaaataattctaaaacaaaggttctgctgtttgtcaaaatgttttgttgtagattagtttaaaaattaaatgcattttaattcttttcaaagtattttcattcacattatattctggtagagttgtagaacagatgtgacaccattaccattgggaaaactgaaatacaagaaagccttactgatatggctaaagtctattaaggttatcagtggcgaagtctggactagatctaatttaattgaatagttttcccactcgacttgtggatcatctgtatggagttaccaaattttgtttcttctgatgatcagtctttagtagatagaattttggctttcttcttaggatgcaattgcttgattttaaatggctttatgtcatatgcatgattgcattgtcatttagatgactcgttaataactggtaataccacattaggaatccaaagttcattcagatcccatggtttttcaagtgtaaaatatatctgaatcatatagtctgtgtgtttataggtctctaagaccactcctgtgttcactgatttactaagaggactcacagaccccagcatagatgtactcacagctaaaatttattacagcggaaggatataaagcagaatcagcaaagggaaaaggtggatggggcaaagtccagaaaaaactgggctcaagtttccacaaatcttctcccatggaagtcacatagcacagacttaactgcgctggcagtgaatatgacagcatgtgtgaaatgctgctaccaggaaagctcatctgagactcaagtgcccagggtttttattggaggtagatcacacaaggcgccatttgtctagcatatactgaaactgactcccagaaggaaagcgggtatttggtataaaccacgttgtctgtacagatagtttaggtagagtaagccactttagcagttaggaatgatgggaactttttctaaatctaacttccaagatattgtcctagggcatcctttctaaggagagcaacttaaggtctgttgtgttaactcttttccatacagtctcgccttcattatatgcttatgttcccttctgtgtaagtgtgggtgtgtggacaaggagcaaaaatgttttgagcccaagtctatagttataaaatttattttgaatcaatcagtaataatttttgtttatggaattatttttaaaaaaataactaaagcttaagtgtagattcacttcatttagtaagtaatcataatattagctaacactttttgtgttaggcagtcttctaaacgttttacatgtcttcatttagtcctcacataccctttaatgtaggtacaattacgataaggagtcttaactaaaattatttctaagttaacaaaagtgttaatacacggttggctctaatatatttcaacattaaaaaagtgaaatgttgatttaagaacatgtctacttggggagggaagtggaaggggggttcaggatagggaacacatgtaacccatggcagattcatgtctgtgtatggcaaaaccaatacaatattgtaaagtaaaaaatgataataaaaaaagaacatgtctacttatttttatccacattttttcttgccatatagtgaatataattgagaagaagcaaattatagtatgtggacaggtaatgaagggagaaataatctgatgtatttattaagttgattattaaattactttgttttatggtttaatcttatcttctctttctcctactagtataaacaaagagaattattgtttgtgagagggaggtacagataaggacatagagcaaaaatgaataatgtatatgatatagaaatctttaatactttctttcctatagaatttaaaaattttgttttctaatttttttcccctcatcagtctttagatgacctttcaaatgtatcttctgatgactcagtacaacttcatgcttacatttcagacactggtaagagactttgtggtttaattattacttaaaaactattgagtatcattacccctaccttatcttccacatttattttaacaaatcgtttttctgttctttagccatattttcatgttacttctttttctggaacatattcttcattaaattctataatgtttattattacatgtgtatttcctttctttaaggttgttactgttatcattcgaaaaaggataaattctgagcactttgtcattgctggtaaactttgaaaccaatcttttctttgagtctagctgataattgtctgcataattcttattgaattgttttggggcagattttagtttgctatttgttttcatacatgcagaagtcagtagatttctgggtaaatgaagcttttgtataggagaacaagaaatgaaaacaagaaatgcttggattaggtgagattcatgactgaattagcatgtgtgcaaaatggctagtgaattgaggaaaaaaataatttcatcattgttactgaattattagataatgtcagtgatggttttcttatctggcttctcatgattcttatgtggatctctcttttctgaggattctgatattctagctgttttgaccattcattcaacaagtgtttatcagcttcttaaagaatatggaagcataatactaagcatttttaataagttattatttctgtcagacaaaattatgtataatcactaaagaggcagtacactagagtggttaagagcaccactttttatctagattgcttgggtttaaaccccagctttgccacttaatggttgggtgaacttggatgagtcttaaattctctgtatcttaattcctcatctgtgaaatgggataatagtaatacttgcctcatagaactaataaactaattgtattagtagttacatggtgggcattatatattagtgtttgttcagtaaccatttactagttgggctccagagtctctttgagtctggagcctatgtccttaaccttatgacaggaagtagagctagtgcagtgcacttatggaatgattcttggactagtggactggaccttcattgaggaatcttgttttaaaaaatattggctgggttagacatacgcttagtgatgagatttatttatattccggccctagttccttgtctggttatagattagtaacaaagaggttgcacagcacctgctctgagtagtaacattgtcctaatgaaaacacaacctcttatttccactgtaatatctcaccatcatcttaaaatgtatgtagcctcattatcttttaaaatcaaattacctttgtatcttagggcttgttttataatagccccatattcttccttttgtgcacccatcatagtctgatctccctgcctatcaagtttgtaacaaatctgattattatttttttaaatgctttctgaaattcctttcttctttccttttctatttcttactagtttccttgtttttattaactcctagttggttatggtttgctgtctaagtggcccctgatttctattttcctttcccaaacctttcttgaacacagcatgtaaagccattaccttgttggcacgctgacactgttgagtgatggtggttttttaatgtgatgaaagtgttgtacagtttgttctgcataggtctccaagtgaaagataattgaaagaggtgaacagtgaataataaagtctctgacagcaagatgacccaggtctgtccccagtcttcagttcagttcagtcgctcagtcatgtctgactctgcaaccccgtgaattgcagcatgccaggcctccctgtccgtcaccaactcccagagtccacccaaacccatgtccattgagtaggtgatagcatccaaccatcttgtcctctttcatccccttcttctcctgccctcaatctttcccggtatcagggtcttttcaaatgagcccactcttcacatcaggtggccaaagtattggagtttcagcttcaacatcagtcccatcttatattttgtcaaatcaggaacactgatattagatggaaaggaaatgaaggacaattctaaatacaaagtgcaaattttagaaaaactttcatgaaaacctgggagagatttctgtagaactgcatttgccagtatagatttgtagctattttgtgattaatttactaagaagctgctcagacctttctttgcctaagtatgtacaaaatacaaaatatttagtcagctccaaagcttggccacttgttttttttacaagagcaatttatacttctggtcaacatgatagtctaaactgctatgcaaaatcgtgcttcctacacatagaaaaactgaaaacagtagaataaaaatacctaaaaggggaaatctacaggtggaatagactatgaggaaaagcaaatatagggagatgaagaggagttgaagccaaagagcttataggaatgtaaagactgctcttttgattttgatagcatttctttgtcctcaaatttaaagaggcacaaatgggctaaggcagaggaaagcctggaaccacaggcctttgcataaagcccacattcacagagggtgacttgatatgaaagaggaactagaagaacttagcctactgtcagaggaaagaacaaagaatgtcaaggtcatggttgggaatggtatcactcatatgaaattgaaaggctgtgttatatcacatgtgggtgatgtaagattcagccatcctcaaggagttttgtaccacaaggagtatgataaaaataatcgtagagataaaataaggcaagaataccacactgtaaaaaagaaccacatccagttatagaaataaaaaaatagttattgaaattaaggtgagtgaatgaattaaaaagcagaccaggtaaagatgagtggagacttagtaaactgttggagacctgaaaaggtgatcttgagtagaatacaacatggctttgaggtgggaaaatggaaaatgagaaagaattattcgaagtacatctctttacttaatatctgtacaaaataggaagaggttttgatttttaagactgcctgacttggatggtttctgtcaattcagtagaaaaaaatgacttcttagaaaagtcttcagaataaattacacttgtaaattgctgtatattttgaatgagaaagacttgccaaaagatcagatagatcttgttgtttgtggtggttttagtcactcagtcttgtcattggctatagcccgccaggctcctctgtccctgggattctccaggcaagaattctggagtgggttgccatttcctcctccagggcatcttcccaacccagggatcaaacctgcatcccttcatcggcaggtggattctttaccacagagccacctgggaagtccagatagaccttaccctgtagcttttgcttgtagttcagtttcagagctatcaatattaattgggctacagctgaacagtgaaggctaacacagaagatattgttttgtttctgttaaaagctctttggaaagagaatccaaagtggacatcactgtgtagttggtagtatcttgatagccttgtaggtcgttttgtaatgtaaccaacacgtataacatcttatggctgtgagtacagatgacaggagtctattttatcctggtgacatccttttgtcttatctgtcatttcaaattctccatttcatgttgtcctttttgtttttgttcttcatcttcctcctttttgtgtcttttgttcctcttcattttgtcttaaatgactagtatatgctcactatgacccatatgctgtggcaggcgtttgtaatgatcacggcaagacatacgcattgtatgccatcactgtacaccggcgcaatgtgaacactgaggagatgtggaaaacctaccgtcgctacagtgacttccacgacttccacatgaggatcaccgaacaggtagtgagatttttaaagtttgtgtactttatattgttccatgattccatgtttgattctaaatgattgtgagtaatggtaaggtatgaccaaagctaagaaaataaggtaacaattttttataatcaacagtgaatactagaatgtttttgtccatttaactaataaattttaaacagtcctaatcattgtggactagtgacaaagtaccaatgatataccttggaaaattagaataaatgtgtatgtctgattttaagagagtgtgtgtatcttgtcctttgcttaggtatttgggttatttaacatatagatagagattattgtaagacattttgtgattttctgtttggtaatataatttaaagctgtggttatttaaaatagcatcctttcccaactactaacaggtaaatcctccactaagttgtatgaagaaccgaaacctaaattatatttaaaattaaccaaataatgattttaattcttaccaaatacagctgtcttgtttcatagaagtatgaggactcttaaacataacaaatgtaaatatttttatttttctctgttttatcttttattaaatattttttcttctttttaacttagaacaaaataaattatcagtggataaattggaataggtaatctgaaatttattttaagtcatgataatctttcatgcaatgttttaaaatatataattattggtaagccaataaaataataataatgatgacatttgattgggtgaactaaagctttgaaatgacgttttactacataagtaatcagaaaatatacctttcacttaggatgtagaaaatgtatggttggcaccataattatctcattaaaatattttgtaaatagagtgagataacctactaataaagctttaaagtgtttagaaaccaagttattattgactccacaagcccatattaaaaggactgtttttaattatattcataaggaaattaataactctgggcatatctcttctattgttcttgttaaatagatctccatgtttggcttgatttgtttgcaaaggtgaaataatttctgccccccaaaattcctgtttgatatttttttttaaatcacatagttcatacatatcttccttttcatcctcacactttaacctaacaagacaaattttgaagtaatgtgaattactgggagtagttttagttacttgcaaatttatgggaatttggtataatatgaaattttctttgtgtgaatagttgtaattttttcctactgttcagaggaataatcattgcttaaagattctaggctgactgtaaatactgtgtttatagattgacaaatatagataaagaacatactttaaaaaaactctattaatagaacaattcatgtagaaaatttacttttcagtacagcaccaaaatcaaatgcaactaactgataaagcacaattcagttttaaagtgctcagtgcaggcaaatgaagtggatgtgttaaagttacagtagtatgtgattactaaaacatggattgtttttggagcttaagaaattaaaacctaagcttgttaagtgaaattttaggtttaaggaaagtactaagcacttgtaaataagactcatactgtttgccttttagttctgccttatttatatttttagttttattttatatttatatttttaaaacaaatcctataagaaaatgcagtgaacttttagttcactggtggcaacagtataaccagtggatgcaaataaattttaactccatagagctctctaagtattaaaattattttagaacaaatttcattttgtttctttaactttgtgacataaatttttttcccattctaaacatttgaactattatttgttttctttactgttttatagttttatggtcttaatttgatactttatggataaagatttataggattaaaagaaaataattgaggaatgggatgaagagggaggtgggaggggggttcaggatgaaatgtttttttcctttttaaatttaagggaaaaaaaagaaaataattaaaatggtgaatgtccaaattattttagaaatgatctcacctctaccagttcattattcagcttatgaccatgaacaggacagaccgagtccttgcttctaagagcttgtgttccagtggataactctgtgcctttcagttttattggatgcttattcctaaatatgcagcttatgtttataaataaaataccaatgatttaaaaatattaagtatgcattaagataactgagtaaaatgtatttatatgtttggatataaatgaactttgaatccttctaataaaaaattctgaatgtttttcaaattttctagacctgacatattcagtgtggaaagataaaatctttgggtttggaatgtctgtgatttatgtatagtatttgagttctttttgaacattgaaatatattttaatttatattagttctttaggtaggtttcttttttttcattcatttaaaaatatttttgtgactttttggcagaggaaatcctattactttgcagggaatggactactttgtacttgtaaataatcttttaaatgtcaaactaataatgaattaatatagagtattaaatttttccatttttcttccttttaaaataacaatatttgagaaaaactgttagacataatgcttctggtacagacagataattttaaaaccagcttgataatttagactttaagaaaataactgttacatttaaatttttgttaataaggtttaatgtttcaaaattttggaaattgttgttttgaggagtactgctatattcccttggtatgttagtttactagaactgctataacaaaatacccagcttaaacaacaagaaatctgttttcttatagttttggaagctggaagtccaagatcaagttgttggcaagtttgatttctcttgagtcagctctccttggctttcagatggtgctgaatatggcctcacatgactttttcattgtatgctgccattcctgatggctctttgaatccctcttataggggctttgttttgattttattccctctctgaaggccttgtctccaaatacagccacttctgaagtactggaggttaaggtttcaacatgtgaattatgagggaataaaatatattggtaatgcctaaataaaccatgcattctgtaaaatttaatcagtagtttaagataccattgaaaagtcatattccaggaaactaaatatcttttagaacaccttgaaaaatgtaaatttacttctataaaatgtggtttaaaaaaattaaaaccaggatattatacattcatattcaataaaaacccattcttatacttctatgaaccaccaaatttgtgactacagcataacattttccctgaaaattactgcccccactttttttttttcccttggctagagtaaaagaactactttcaacttacatgcataacatgtgatgaacttgtcacattatagctccaagcaaccatctgatttgtcattccacttaataatttatcagaatcttccagtttggggatgaagattatcctacaccttttcatttcctcttttctttaatctctgcaccaagaatgagttttctctacacactcattgtttgttgttatttaatcaaagaatggttttagaaagcttgttgcttcctggatatgtattgcacaggaaaagcaatgaagctcctcattgaagttttagatactagatattgttggccacgcacaataacttgctgaatgacgttgttcttccactttgttagcagctagtatggttaaaatctgtgctttaacaaggcatggtggattgctaactatctggacttctgaaggtgaagtctatagatggctaaacttcagatatgtacaattgtttttgttagtggctttacaaatattagatatatgctatatagctcttttattttcttagttattatgaatttatttttcatgtagtttcgtatagggggaaagtatctgttatactatatgtcattatatagacagagttatagctgtaatctatattttgaagtttgcctcttctacttttaatagttagctattacagtgattaactgatttgaaatcatcaatataaaaatatttccttgagttttttcaagaaaccagaaactcataactttgattattaatagtttatttgctaatactttattcttgtcaaaaggtttttaaacaaaatgttttttaaaaccttttgttatgaaaattttgaatgatcttaaaatcagagaggttattaaaatgaaaaaccatgtggttcatcagttattcatgtttgtcattcttagaaaataacttctttgtaataacattagaactgtggtttggatatatttgcacagtattttctattttctgattttggcttaataagataaaatatattgcaaaatctgtttaagatacttctgatacatagagaaattgtcacttggaaaatacttttctctttttgtaaaaataatctaagattattgaatgtattttgttttgtagtttgaaaatctctcaagcatattaaagcttcctggtaaaaagacttttaataatatggatagagattttttagaaaagagaaagaaagatctaaatgcatatttgcaggtaagttcaggtttattattactcgtaggtttcattttaatagagcacacaaatacagctgatttctttggtagagaatgtttttactgtaatagtgagatagcagccacttttgaggtgctgagatgtgacttgcaatctgatcagtaatttatgaacattatttctctgtttattaatttagaagttttctggacactcagtgctagaaattttaccttcaggtttgaatgaaaacatacccacacccacacccccacccacacccccacacacgcctacacacccacacctgtacacacacccacacactcagtgctagaaatcgtaccttcaggtttggatgaatacatacccatacccacacccatacctacacacacacacagttacatacacacacccggaagatttcacttcagaaataataaaatgtgtctcataagttatttcctgcgtaaggactgtcagaaataactttattttagaaagtagtacccaaataccagattttaatagtatcactttatggttttttatactaatgaatgatttataaagatgtttcatctgttaatattagctccccacttcactctttaggagtcagcaaattccagcctacagaccatatccagtctgccacctgtttattagagtttattatattattagaacacagccactcgtttcgtttactgctgtctatgactacttttcggagaaggcagtggcaccccactccagtactcttgcctggaaaatcccacggatggaggagcctggtaggctgcagtccatggggtcgcgaagagttggacacgactgagcgacttcactttcactttttactttcatgcattggagaaggaaatggcaacccactccagtgttcttgcctggagaatcccagggacgagggagcctggtgggctgccgtctctggggttgcacagagttggaaacgactgaagcgacctagcacaacagcagcagcatgactgcttttacactactacattggagttgaatagttgcagcagactatggatcacagaactttaaataattattatataaactgtacataaaacatttactggccatgtcctaatatttagtgaaatttagccaatactatacttaatattttgggggaagttttctctctcttaaatgtttataagtctaactgagtttgcttacaactattccatagcactacagtttactgaaaggatagaaaaaacataaatctgttgttactcacctttgtcttctggctcaaggctaaatgatattatttatatgacttgttaaacattttgattttttagaatgtattaactttagttgcattaaaatctgtatcaattatttataaaatttagaaaataagcacctttttcaaaatctggtgccataaatgtatgttttagttgtggctgtactgtctgcatcttacctaatgatctcaatatgtctaaacatgtttcattgaaggaattaagctagaatgttagactatatcatgttgtaaaagcaacagtttgttttggttcctctttataatacttaaaagttttaattttaattgttttatgtactttccattaatggtaactttaaaattagaacatgaataacagcagtttactactatggctcttcttagttataagctgtaaaacctgaaaatggaatagtaaataacattttggggaattccctggcaatccagtggttaggacttcacacttccactgcaggaggaactaagagcccacatgctacgtggcaaggctaaagtaaatagataggtaatagataaatgtgttaatattttaaaaaataatgacagcattttttactatacattcttacctttctagcagatgacattgttagtagtagttaatttccagtaccctatcaatataagatgcctcttatttttcctgttagttactgttaactcctgaaatgatgaaagcgtctccagccttggctcactatgtgtatgatttccttgagaacaaagcctacagtaaagggaaaggggattttgctcgcaaggtaagcagaccattgcattggctttcttcataggtctgttttcttactttgttttcagtaaaagaagataatttatgtgtatgttttaaaactagaaattttattaaatgttctttggtatcttctgtgctttatcaaagagtcagacacgtctgagtgactgaactgatgttttatcaagcctactatatataggcatatctaataaactcctgtttttacatgtagattaagatctagtagtagctggaaaggggaggggaaaaaaaaataaaagccttgtttctgaagtgatgctctaaggaaagttggcctaagacaagccacaggctttcattagttttaagaaggagctattaatccttcttattgggaggaaatgtcttttaattggagtaaggatagtaaaaatgttaagaagactctgtcctaaaagtatttatgccttttgagtgaaatagttattatttaaatttttagggacacaggcctgttctggaaataagatgctagattaagacaataaatgatttactgctcaggttgggtgagagagctcactgggtgagaaggcaaacagtggaatcaggcagcatttggttcaaattcctgttctgccatttattagttgtggcctgcaaaatgttacttgacctctgggccttttgtttcctcaagattgaaggtgttaatcctcaatttagagcatgtgtgaatcaaatgaaataatctatgtatgacagtgcctgtctgaatcagtgttggctcttagaagtagtaacaatagttaacaggagctgcagcattagttggggaaactgtaagtaggaattctgtgtattatttttgcaactttttaaaactctgaagttatttcaaaatgaaaattagaagacttccccacctctcatcccctataaaaagattaacttgtttaaaaaagattaaggaattggtacaactaagaattaacaactgtaagaacttcaaatgatctctcaaggatactatggtttaacatccaagtgaatgttaatatttctaaatggaatgttttattttaataagaaatactaggttatgtattttataatgatgggaaaatatggtgaccttatctttgtatttcatgattgaagtgattgagttttaattccaactctaaaatagctttattgttattggagatgcatgttaatattccatcttttttatgtttaccttagtttctctcttaagattgcatctatttgagataaattataaattgataatagccttttgagataaaagaagcattatattgtttagtcgctaagttttgtccaactctgtgactccatggactgcagcatgccaagcttccctgtccttcactgtctcctggagtttgctcaaactcatgtccattgagtcagtgataccaccatccaaccatttcattctccatagcccctttttcctcctgccctcaatgtttcccagcatcagggtcttttccagtgagttagctcttcacatcaggtggccaaagtattgaagcttccgcttcagcatcagtccttccagtgatattcatggttgatttcctccaggattgactggtttgagcattatattaaatgtaggcaatttcttttttaccaccctacagtatgtgtgtgtgtgtgtatgtatgtatgtgtttatctccaaatagttccatgtcacttttaaaaaaaattactactagagtctaaaaatccttttgagtcacttctgggaatccacagtagcatacattttcataaatcatattaataattactaagttcatcttgacatctttcagattgttgggataattttcatgaatatcaagagttttcagctacatttcctttttggataaattgtagtttaatattttcctttattgtatttcactggaaattaaatagctattagagaaaataatctacaaacattttatcagtggctagtcgtgttggagaagactcttgagagtcgcttgggctgcaaggagatccaaccagtccatcctaaaggagatcagtcctgggtgttcattggaaggactgatgttgaactgaaactccaatgctttggccatctgatgtgaagagccgactcattggaaaagaccctgatgctgggaaagattgagggcaggaggagaaagggacgacagaggatgagatggatggcatcactgactcaatggacatgggtttgggtggacagggaggcctggtgtgctgcggtttatggggtctcagagtcggatacgactgagctactgaactgagctgaatcagagcttgagaaataatacttcataacacattatcttggtcacacaatttgcctagctttgcaaaatttatgggccagttcctagaaggaataatagacaagtagtcttcctctatgcacacagtatctttccagcttttttttttttatcatagtgtaatggcatttttaagctgtaaatagggacctaaatttaaattcaaattcccttgtttgcatttttaactgatacaaataactgaggtgacaattgaatgaatagctaacatctagttaagtcaggcaaagtgtacactttcgcaggcaatcaataatttacttgtctgcttggtaatttgtaattgtctttttgtttttttgctctaaacatcttttttaagacatatcttgctgctggaaatgttagattgtgatagacttattttatgcttctaaaattctacttttttcatggttgagagacataatcatgtgtagaggtttttccgtggtcctttgctccctccactttccaccaccaatacagatgtttaagctttaccctcagaaattgggtggtgaaaaaaatagaaacaaaaaggaaaatggatcctgaaggtctaggattggtgctcagacagctatttttaattattatgtaactcatggtatagatttaagttctcttattttgaaagagtattagtggtaggtagcctcatgcctgggcttcccaggaggcactggtggtaaagaacctgcctgccaatgcagcaggcataagaaatgtggatttgatccctggtgggggaagatccccttgaaggagggcatggcaccccactccagtattctggcctggaaaattccatggacagagaagcctggtgggctactgtccatggggtcacaaagagtcagacatgactgagcgacttcactttcatgcattggagaaggaaatggcaacccactccagtattcttgcctggagaatcccagggatgggggagcctggtgggctgccatctatggggtcacacagagtcggacccaactgaagcgacttagcagcagcagcagccttaagcctggacagcaactgaggttgtattcatttaaccaacttaagattgtattagctgaacccatgtttccactgtgaagtgtaagatatataaaattctaaagtacttttgatggtgttcaaacaatttttaatgtaagttatagattcaaatgaaattcgtgccttttatgcttctgaaattctcccttatctgtgaacattaaaacttcgttgaatggtggccattttcctaaagttgtacattttaagtgtggtattctcatgtttatctctcttaagaattcttgtgttctaaaacactggcaatagtgtcagtatagaagtaatgtcctgactgatttgaacacactgttctggttaactgaaaattactattgtatatagaattaggattaacacacatacatatatattataattttacacccaaatatgtatatgtatatataattgtacacacaagttcacgtgcacacacgatggttaacttcttctttttatcgtttttaatctctgtatctcttcagtggcagcagttttcaagcttctcttcctcattcctcacctttggttctactatgaatttgttgtactgtgacagtgtccctcctagaggttgtattttccagcaagcatatctgtaagactgctgtccctgcttacgccagagaattattaaaacttttacagttatcttgaaattcccttttgttgttattgtttattacagtacctatttcaccttttctggttttcttgttgaaaatcatgaaagcatattaaataattttatgttattaatatctcttaacgttgtgtttcttaaacagtggggttcagtgttttttgctatgattgtttttgtttttttttcttcctgcatggaacataatttgtttctatggtagtctttataagattcgactctttcaggaaaatattcttagtattgtttgactttggtttggtgtctggtttttattttctgctttccttcccttcctcctcctctccctccttcctcctctctttctttctttcatttgtttgtttttatctgttaaaaatcaagatcccatatgcatctactttgggttctttattagatggctctccctttcttaattgaaactatctggcatctattacagtcaaaatgtcaattttaaagcttcctatccctctgagattatttatttatatatctcttagcatattttctttatggtttttctattctgcctcagtaaaatatggcttgcatgtctgatttgcagcttctctttttcctaatagattccagattccttccatagattctaatcgaggatgaaacctatcctaaaaactactttgttaaataaatcttagctctttgagctttctgtttgtttattgtatctgctcatttacttttcaatattgctcagaatatctatgtcattgctgccttgaatcacggcagaagtatgttatagctgtttatacttggatccaagtttctgtttgggaaaactcttcatttttttcagaggttttcttagtaagaaggcaacccaaggtttatattcattttctttcagtaaatatatcacttgtatatttgtgtctgaaaatacattttaaagacactctaaagacaacagttcagtacttttaaaaggcaatgagttattacagactggaaagttattacacctttcgtgtgttgcacttggtttatgaggcttttcagttgaataataaacttgatacagtgaagtcatgatataatatcttttccctttagatggacacttttgtaaatccacttcgaaattctatgaggaatgtttcaaatgcagtcaaatcccttcctgatagcttggcagagggaatgactaaaatgtcggacaacatgggcaaaatgtcagaaagattaggtcaagatataaggcaatcatttttcaaggtaagaagatgttttcagtaatgtctgaaggaaatgatttttaagtcaactaagatttactgagctcctgcttaggtttaccttatttctctttgtgagtccaaagctctctagacacatagtctcataaagaattaaaaagctaaagagaattgattatcagaagtggatactgtaaaatgcactcacttctcagtctctattgcagtacaatttaaaaattaatttaaagcacatttaaaattagtgaagttaacattctttgtactgttttattccattataccatatttactctataatgttaaaatttatagcaaaacaagtacatgctattgtataaattatactagtattcatcagcaaacataaatttctcctgagtcacatgattaagattcacgagatgaaagggaggaagagtctttcaacatcatcaatccttagtatgtggatacctgtgagaggaacagaggagtttgcttgggagcattttcattatactagtagtggatactggtgaatcaagtagttttttgcttcctaatgtacatttttaaaaataatttcgacctagttgtttaaagttgtaatcaagactatgaacgaaatcatgtaggtattagaactttgtttgttagatcatgtttccatgaagaggaaatacatataaacacagatagaatttatttattgtaagagacaattcctaaaatgtcgtgtgtgtaaatcatactcttctgtcaactctcatatcttctctgatgctccatctgaactcctaatcgtggggcagtgcactaacactgaagcaagggttgtctggtgccgcttctgccggtaactacccatatgacttcatacagaagtcgctgaacttttgcaggcttctttttcctgaccagtatgtgcaggggttataacaggtgatcttggtggtccttcctatactgagaaatgattaccagctagctcgagggtctttctgtcccttttctcaatagcttacgttatgtaaaaattagttattagtttctttcagcctgttaacatactgcaaggctctttatgatagaagaaaaaagattgcaattctattctctgactgtgctattcacttttgtctttaaatcgtttaacatttcttagctttaaattctaaaaagtatggaggtttgaaagactaatatctccttccaactcaaaatgaatctcttttttttttttaaggaaaaaaaatctgttgatagtgaagtaattacccttttatatttggtttttaactttagattgttaatactttgttaatgctctataaattttatctgttgtccccagaatcaaatcaagtgctctttattatatttgacacttgtttcagtttattatcttgtgttgtttcattttctgctttagtgtgtttactttgttgttgttgttgtttttaatactaggttcctcctttaattcccaagactgattcagatcctgaacattgtcgagtttcagctcaacttgatgatactgtgagttaatttttgttttggtagcagtcagttggaattcaaatcatactttgcagatctttttaactttttaatgaactataatatgtatatgtcattaatgtactcatattttaaacattaagtttgatgaattcctacaaactgaacatacccaagtaaccagcactataaacaagaagcagaacgttgccagtaccccagaaagcccctaatgctctcttcctatcactgtcctgtcccctgccaaggatagtcactgtcctgacttctaccctgcttttatactttatatagatgaaactgtaaggtatgtactcctttcagtctggctttttgttcaacattgtggtagtcttccatgttgtctgtgtgacagtggtttcttcgttcatgtggccttacagtaccacattttgtaaatataatacaatttatttgctatgttatgaacagtactcctgtaaacatttgggtacatatctattgattaaataagtatgtatacatttctctctgtacccagaaatggaattccttggtcaggggttatgaatatattcaattttaatacatactctcaaatagttttccacactgttgtaccacttacattaccatccgcaatgcatgagaatttcagaggttcacagcctgccggaattcaatatgtttatgttatgcctttttaattttagccattctggttgttgtatctcatatggatttacatttctctgatcataagtctgttgtccatttgagtgtcctgtcttatatgtctagtcctttcccccatttttctattggcttggctgtctgtctttgtctttgattagtaagagtacattgtataatctgagtattggttatttgtcagatacaagtatttgtatattgtaaatatcttccaccttgggtgcttttattctcagtgtataatgtgtctactgcacagtcacatagatgttctcctatgcttttcttcaaacatcagttttcttcaccatgccaaaacttagatttgctattcatctagaattgattattgtgtgtagaatgatgtaggagtccagttgacctaagcactatttattgagaaggcctgctttccccattgtatgtttctcccttgttacaagttaaattattttatatatttgtgtctgtgctttatattctgtcctattatgcagatttattttaaagttataattatccccttcagtttctcattggatttctttacagtaaactgtcttaaagataatatttttgtttttcaagaatattttagaatgtttatatgtgttgtactgttataatatccataacattatgccttttagtaaatgtttataatttgttcattagaattgttaggtggcactaaactcatgaatatacttgatcagagaatagagcagtactgagagcgtataagccatgaacttttgatatgtaaagagaaggcacacttaagaaaatgtttacaacacagtgaaaaatgaatgactcgtgctgttttctcagtatgcaaattgcagcattgatgaggaaatagaaaagagtagcttcgtgatcaaagaattagaaaattactagcaattacgcagtttgttgcagttctggatctgcacctttcttgttttctctatatatttccacatcaaaggattctcattgtctttctttactttttatatcattaattgaatattcccatggtgaaagtgtacaaatttttacttgttaaaaattaaaagaaaattctagtaatttagtcaccttttgtaatgttagctgtgtactggattttattttaggttctttattgtaagaatgcctaatatgtacaactcactaaccaaacaaaacaaaatgttctgtgtagattttattttgttctattgaataaaaagaaatgttgagcatattttgtccttttgaaaaagctgctccagagaataggcagaggggctagctagcatgtattgtaaactaacagagactctactaaaagatcccaaatcctaaggtcatcatgaatccactttgagaagtttttttcagcgcagctttggagtttactcaccattgtagatttgttgaattctgttttctgtcaaaacagatgttaaaagtattttttgctaaattagaataaaaactcagttataaaggctatagtataacttgttctccaacctgtaaataatagtaatcatttggtaaaagcaacaaaattagccattcacaagagatagataactcaaataaatgtatctcatttcttcccattgttttctcaggtggatgataatattccacttagggtaatgctgcttctcatggatgaagtattcgacttaaaagagagaaatcagtggttgcgaaggaatatcaaaaacctacttcaacaacttataagagctacatatggcgatactattaataggtaccacttttttaaaaaacagaaaaactacttagagctgatcttacttagcttttaaagttttacttttagaagtagattgcccaaacttttgtaggggaatttctttctgtgggcctttgaagaaggttattgaagcattctattgctctcagagataatctacacacaaattaagttgcttactccatgaaagaagtaatgtttctctatttgatttaccttctaaaatcttgaccatactcatttaaatttctttactttcagaaaaatagttgaccatgttgattggatgacctcaccggagcaagtagccgacttagtgaaacgtttcaggtatatctttagacacagtcttccgcaggtagcacagagttgagcattgttatcactaacttttattgcgttccctttctttttggccgtaacattggttttaatcatcactgatgagcaaaaagacttgtaaaaattataataaacatttatcccttggacttattaatctttgttttctttagaaccagaatagaaaaaaaaaattgtaagtgaaaaagctttttagatcttaggctacattttatcacagtaatgtggctttaaaataattgaaatattagtatagacatggcatggtcatataatcagattaactagttttggagattaatccttctcagttgtatttgctaactttgattttaagtgagatattttagaaatttgtttgtccctgaccatggtctaaatttttatttagacccttctatttatttttatttaggctcttttatttagaagttttatttagatcctctgaaaaggttcagattaagagcagtgatactccagttcatatatcaattctccaaaaatgttctcagccccttctctgtgtctagcccacttaactggggactgagaggtaagattcagtcccttcaaggaatgcatggcacagcagagaaataaacatcttttctaacagtgagaggtaagcagaacacaaatatgcatggcatcatgtcctttgaagtaacagaaacaaggcaactatcaatagcgtacagtatttatttggcaccgtccaactacttgactatggccactttctgattttatcctcctttacgagatagggatttttgtttccattttgttacaaggaaattgagaatttgagaagttcagcatcttgcccaaaggctcacgtgctagaaagttggggaaacaagtttctctaatctgaagctgagtttctcctcactgtaccatattgtttctaaaagctgaactgccttccctggcatgttgattctgtttcagggtgggtaaatgttgttcctctggagggcacattggaatcacttgaacagctttaaaaagtactgatccttaggtcccatttgcagagtctgacttaatgcatctggtggaaggcctggacattgagtgtttaaagctcccaggtatttctaatgtgcagtcagttaagaactgttctgcccaggctctctctgagaccagatcccaggtagaagcttagttattgtgcttaattcctctcattggcttgaagaactaagaacagtaatcagcacactgtaaagtaaagaagaatggattatgtaggtgaaagaaacattgtaatcaacatagctgtaagatatgggtgcagttactccagggcatacttttgttattcttttcttgtgtaaaccctgcacttagttactatctgttgaatatcacacctgtatagaatttcagaaatgtttcctttttctgtttgcgtttgtgttttctgtagaaaattagaataattttaccaacttgtatcattaaaaaatgaagatgtttacaaaatttatttaatcttcttaaatagagatgccttctggccaaatggcattttagccgagactatcccatgcagagataaaggtattcgaatgagaacaagagttgcaggaaaaactaaattactttcaattatgccaggtaagtgaacatttttagcataaatctcaatttgtacttcggaatttatggcatgcattgagcatgccaaatttagctgccttttgactataataacttatcaatttgatggcttatataccaggaggcattttgctagttatttctcatatatgtttaactaatcctcataacaatattggagaagaaaatggcaacccactccagtactcttgcctggaaaattccatgggtgaaggagcctggtaggctacagtccatggagtcacaaagagttggacacaactgagcgacttcactttctttctttctatagttccttttggagcaggagatgacaacctgttcttgcctggagaatcccatggacagaggggcctagtgtgctatggtctgtggggttgcaaaaagtcagacacgactaagtgactaacacacacacacacacacacacacataacaatattataaagcctagggagctgttaacagcaaaaagtcagacacaactaagcgacacacacacacataacaacattataaagcctagggagctgttaacatcacagctttaaatatgagggaaaaaatcagccgaagggggttgagtgtaaatacccaaggtatctaccttggaatagatggtaaagaatctgcctgcaatgcaggagactggggttcgatcccgggatcgggaagatcccttggagaaaacaatggccacctactccagtattctttcctggagagttccatagacagaggagcctggtgtgctatagttccatggggaattctgtggacagaggagcctggtgggctatagtccacagggtcacaaagagttggacacgactgagcaactaaaacacacacacccgaggtttaagcagtgagtattggaactctgacttagctttgagttcttgaaaccactgtattcaaccacttcagtaaaaattatacttttaaccacttcactttgctgtcttgaaacattttaagaataaagttgatgataaaatctgtgacagatgaaagtgaaagtcactcagtcgtgtctgattctttgtgaccccatgtatacagtccctggaattctccaagccagaatactggaatgggtagtctttcccttctccagggaatgtccccaacccagggatcgaacccacgtctcctgcattgcaggaggattctttaccagctgagccacaagggaagcccaagaatataggagtgggtagcctttcccttctccaggggatctccccaacccaggaatcaaacaaggatctcctgaattgcaggcagattctttaccaactgagctatcagggaagcccatgacagatgaaagggctaataataaagtataatgaagtatgaggttttcggaaaaagaatatttgttctgtttaagagaacaagcacattttttcaaagaatccctttgaaacatgcttaatctctgctaaaacatagtcctaaacaaagtatacatggtcgcattcttttggtgtaatttgaattattttagaactctgctatctcactaacttagatttactttgtccatttgtcttctctcagtaagagttttgtttggttgggtggttgatttctcctctggtgataaatgtcttttaaaatacctagataactcttctccacattttaattatggatgtagggaatagaaaaatacttaagttttcagtatctatttcttttcctataattttgtttttctttaaattttcattatagattttaatctataattctcttctgtccattaaattggatatttgccacatggctatttattccactcgactatactgttgcatttggagataaaaagcaagttatagaaataacattttagaaaaataaagggaaacagtagcctaggatattaatatacttttataataaaccagatggtgctttagacgtactcagttacggagtagaaagaaatcttaatgcatttgtacagtaaatatttattgagagcacttcgtgagccagacactattctttacactgatctttgcctccttagagtttacattccactaggggacacagaagacatacaaaagacatagatgaagcacagtatattggatagtgctaaaagccaaggagacagatagtgcaggaaaatggaaatgacagccgagttgcagttgtgaatggatgacacttacatgaagacttgaaggaagtgagggacgatataaaaataggtatttttatatgtacagaattcctcacctgttttttagtgaatttaaaacctatttgcttaaaattgtattgtaccgtagttagaaacatactttttgggagttgcatgtttcttttgaaagcaataaagtgttgtttggggggccctgtttataaataattaggaatgatcctacatgatgttcccatactcaagtgtctctagtaacttgatgttgcctgtgagtaaactccaaatgtgctcaccctgccggttgaagcactgccagttttccattcttttcaccactttcttttacaggaatcctaaaattgagccaaattgttctaccccatttcttgagcctgtcttttttgtttgtttgtttgttttccccacttggtgctcatttccttatacatgttcttaaatcctttgtctgtttgtaccaatcagatcctgccaatgcacttagtgtgttgcaagtttttttaaatcagagatcaagtttccacatttctttgtagtatttctcattgtgcattagatggagaatatttttatagtgttctagagtttacagatcacttttcactttatctcatcaaagctttataaattctcacagtaataatgatgttggttattataaattcccattttacaatgaggaaagaaactcagggtgagtgagttatataggtattaagggacaggccttcccagatggctcagtggtaactaatccgcctgccaatgcaggagacacgggagacgtgggttccaaacctgattcgggaatatcccatagaggtggaaatggcaacccactcaagtattcttgcctggaaaatcccacagacagaggagcctagtggtttgccatccatggggtcacaaagagtcagacacaactgagtaacgttaagggacaagattataaaacttaatttggggtttctgagtctgggtcctgctttctctgttgttatattgcctcccaataccacacaagtgtgtgcctaattgtgacatatataagttttaagtcagttattaaacttatattaaggtcattcactgaatactggttatttatcagtcactcaaatgtgtactttacatgttttaacttagaatacttttggccttgtatttcctttgaataatgaattgtgtttatttcccctccccttacttagatgaactgaagcacattattggagctgagacaacacggaaaggtattcttcgtgtttttgaaatgtttcagcacaaccagttaaataggagaatggtttatgtctttttggaaggctttttggaaaccttatttccacagtataaattccgtgaacttttcaacaaactgcattcacggtcaaagcagatgcaaaaatataaacagaaacttcaaactactcaagcgccttctttacagaaaaggtgacactccaatctctgaaactggtgttcattttgtccaggactaatggtatggacggatcttctggggcttaactcatacactgtcgtgtctgcaccagtcttttagtgtctcagaatagattattaatacatcatatgactgccattcttctcatcattgtctgtcatccagccacttgtaccaagagaaatttctgtgtcttaaatgatttggtgcatatttttgcaacactgagaggatactgcctacagctcaagcaagaatgacattggtttcttccgtttcaaactaatcagcattctccagcaatgacaaagtgccagagtgtatatatgagagttaaggaaagcacaaaacaatggttcacagataaaattggctaatttgtttaacagtgggaaactgtgcaatgtactgtttggaggggtttcttttgcataatggttttatatatctttttcggaattttgatatagtgtagattagccaggtgaatgatctttgaaacatctgtttcaggtctagggaaaatgacagaatgcccttgaagtatgaaatgacattatatccaaattacactttttttgttttcatgacataaaaacctagtgtaaaataaaaccagtcacaaccaaagtttgattggatttgttattcattggtagaaaacagattttaagtaattcatctatgtcttaagggctctagtttgctcttatggtactcataattaagtttcattttggcattctgtgtgcaaaaagaagcatatggtggctcttacttaagttttgaagttattacagctttctttaagagattattgattatataataggggctagaatttgttgaaggaactgccaaatacttcttaaaatatggaaattttaaaaaagtactcttgaaagttactctatgataattttaaattgtgtgatctagacatacgttaggtgattgcaaaaatagcaaatcaaaggattaaatgagcttataagtcatatgtaaatgtacaaattcctaactattacagtgtacatatatgaaaagaaataatgaaaacagaactataatattttttaaaatatgcttttatttatattttgcataatgtaaaattctactaaataaagcaagttggcaaaacccctcggtgtatacatttaagtccctaaaataattttataccaacaacaaaataccttttccagtttcggagcttctgcatttcctatagttttctcagtctccatttgtccatcttggaagtcttcatatgttttatatgcaggatttctgcatagtttaacttccactgactaagtgtttgggcatcttagcgttttttgttttgaaaatatttaacactaaaaccttataatagtgaagctatttatcagaccactgagccaagatgctggtgttaaaagaacttccgggtgcttaggataaagggacagaatattggtatcccagttgtttgggagttttaagattgggacaagatggtattgtcttgttcttgctgagatcctacttatgaagcaaagcctgatagaataaagccttcctttaaagctttatgataatgatcatatttattaataatgctgttatgcatacttatagtttgcatatattcagcctgtgttgcatgtcttcagaattacataaattaaatccttttcatttaaacttccaaatgagaaaagatctttattgactctggtggaagaaataatatttcttctcaatgtatcttcctgccccaggctttagaagaaacatgtgaaacatgtctgtaggaagcatcagcatggccgtaagtgcaatgattttcagatacaccccccacccccgtttccagtatatttttgacataagtaaatattaagagtaaacagaattcatgtaagagtctactgtgtacatgtgaaaacgcattactagataatgtgaggaacgctggccatcaaccagggaaaggtcatgcagtattgcagattttcatgaagccctgcaagataactgcagtcataccaaaaactattagagtaagtgggtttttaaagtaatttttctttaaaagagtttatatttgaaaagcagaaatgtcaaatggtagcctatgtaaatggttgtgcatcttctctttgcacatctgtgttttacatcagagaaggctgtggtcatgctaaaattagatatactttttgagtgatttggtcgagctgtgtgtaaaatatttaacccataagtacagtgtactatgtttaatgaagttactacatttaatgcatttattgcatatatgaatatatacaggaagaggctttatgtcttctgatatttgctttttgaatgtgtttttaagtcagtggtgcctttaggcaagaaccttcaaaattaatcattctttgagtttttctgatttttcaggtaacataaactatttagaaaccatcactactaacttacagttcattcctctaaaaagttgattgtatgatttaaatgtaatacttagatgggcatttcctgtgattagggttttctgaatagttgctgaaaataattgtgccattgaccaatggatgcacgtggttagccttaatttttattttaaaaaacatttaaaactttcttgaatatagcagttccttcattttaagtttctgctgcaggtgtttagaaaaaaatcaaacagttaagcactactagaaagtgtaccaattttttaaaaattaagaacaatataaaatttcacaatctaaaattttaatttgtgcaatattttcatttaatgcatgtgtatttgagtaattgtaaaataaatgaatttttaatgttttgagatctagttaaactgtcttcttaacccaacaacttacattccgttgttgttgcatccttttatttaaggacttgttttaaaagtcgttttgtcactccttgtaaaattcttttgttattagtaaattttgcttataggagcatggctcctgtattacaagggaaaaatataaagagcacattttaggattacaattgtttaaagataacttgtgcatatcattgtacaataagtgtcaactgtgtgcctaactattctatcaatacttctttaacaaagaagaaacagcaatcagaatgtcagttatttttattgaactaaaaagatttaaaattttatttggtttgcattatgttttgtccattagaaaatactaataaagtattaacaaacctttttgttgaattttatttcatagtgatgtgtttttattacttttaaaaagtgctaaagttcagttgtcttacctttagtatctgtgtgtattttcctttcttttcaatttggaaatcaagcaattcaagttccaggttgatggataaactactgggtgattactgacttactacaacaaactgaatttactttttcctttcaggggacaagtaatttactacctcagcgttaaagaaacttcatataattttcccataaagggagagacctataagtaatctggtaacaatttttgtttgacctccttttaaattcctaacatgcctgctgtgatgaggtttcaggtttaaaggcagtagatgcagtactgtgcagtgtagctctgcctcattggtcatagtatttgcagccatcgtggctctggatccacagacctcagacatcagtgtgactactcctcccctaccaggggcagtcacattgtttctcaaaatacttgctgt

SEQ ID NO: 246 - DNA, 1212 bp, Hippotragus leucophaeus
  source 1..1212: mol_type = genomic DNA
gcctcttgatgaaagaggagagcaaaaaagttggcttaaagctcaacattcagaaaacgaagctcatggcatctggtcccatcacttcatggaaatatatggggaaacagtggaaacagtgtcagactttattttggggggctccaaaatcaactgcagatggtgactacagccatgaaattaaaagacgcttactccttggaagaaaagttatgaccaacctagatagcatattcaaaagcagagacattactttgccgactaaggtctgtctagtcaaggctatggtttttcctgtagtcatgtatggatgtgagagttggactgtgaagaaggctgagcgccaaagaattgatgcttttgaactgtggtgttggagaagactcttgagagtcccttggtctgcaaggagatccaaccagtccattctgaagatcagccctgagatttctttggaaggactgatgctaaagctgaaactccagtactttggccacctcatgaaaagacttgactctttggaaaagactttgatgctgggagggattgggggcaggaggagaagggggcgacagaggatgagatggctggatggcatcactgcctcgatggacgtgagtctgagtgaactccgggagttggtgatggacagggaggcctggcgtgctgcgattcatggggtcgcagagagtcgtacacgactgagcaactgaactgaatggtactcattgtgaagaatttttacatcaatgctcatgagtgatattggtctgaaattttcttctggtatcttttgttagggtattatggtaatgctagtctctgagaatgagttaggaattattcctctgtttctgtcctctgaaagagattgtagagaatttgtgtaatttcttccttgaacatttactggaatacaccagtgaatccattttagtatgttgtgttctgttttaggaagttattaattactaactcagttttctctgttgctttatcttttcctattcctattatgcataatttacagcttttgtagttgtcctacagttgactattctgttttgtcccacccccagttttggtggtttctattgagataccctcaagtcagaatcttttcttcactatgtccagtctacaaataagcttattgaaagcatttactttgttacagaattttttttatctttatcatttcttcttggttct

SEQ ID NO: 247 - DNA, 434251 bp, Hippotragus leucophaeus
  source 1..434251: mol_type = genomic DNA
tacttattattttattatgtattagactagtgcatttcttatttgaacacttttaattcatgtcattgagtgaaacaaagtgataacaggtgatatattttatattgaggtattttaggttttgcgttttttttttttttttggtattataatgctgtgagtattataaagtgagtttctttcttctattttagatgatggaaagggtgattaatgtgtaagctaacatttgtctcctaagagccaaaaatatggcataaattttttcagctttttgcattgatggctttgatgtaggggtcctttgcttagggagaggcatatttgaagctattttatttatttattcttccaggtatttgctgtttatcctgaagctcagctgaggcagagctcagctgctctctgtttcttgattgttcacttcctattggccaaccaagacttttattggagaattctgttgtacagagcctgacatcatttgtgggccgtaacaggagcatgcatttgcaagtgtcagctagatttgtggatcaataaagttttcttgaaaggtaagtatatgttcatttcaaaatgtacgttttaaattcagtgctattaacatctgtcttagtctgttctggcttctataacaaaaatcccatagattgtgtggcttacaaatcacagaaatttatttttcactgctttggagactgggatgtctaagatcaagatgctagcagagttggtgtctgatgaggatccacatgctggttcatagatgggtgtcttcctgctgtgccttcacacggtgggagaatagagttctctaccgcctctgtttataagggcaccaatcccactaatgagggctccatcctcaggacctaatcacctcacaaaggcctcactcctaggccattacgctgggaattaagatttagttttggggataataacgttgatttcatgatgataccctatgatagttatcatgatctgtcttatagacttgtgtacagaagtgtgtgctgtgtgctcagtcacgtccgacgctttgtgatcccatgtaccatagcccaccaggctccccatccattgaattctccaggcaggaatactggagtgggttgctatttccttctctgtgtatgggtatacgtgtatgtatgtgtctatacactcatactgagtttagattgcagactcattcagggaataatgttaccctgtaacacagagttccttgacagtttctttccatttatctattgacccaccaacttctggtcttttctttttcttcattgttttccttccttcttaattaaactttcactgggctttaaaaatattttcccaccagaatactttcagcccttttcttactgaatactttactttttgtattcttatctcttttcctttttcttcaccttttttctttctttctttcctactttcctacctacttacctacattctgatgttcattaagtttgttgaaggagttgcaaacttagaatgattaaacttaaagctgaaggtatatcaaatagataggatttacttttttatttttaaccacaacccatagtgagaaataaattttgcgttgatcagacattttcctcaggcataaatgcacaaatgaagctaacaaaagttgaaacaattctgccttggctgccttgaatgtgtactgtgttctattttattacattttttgtaaacttcatttaatatatgctgatacccataatacatttatttccctgatcaatgatggatcacttttgcaatttcaaaagtcctactgtagatcactttatgactgacctgtagggaaaataaatggaatgaggcattgttttctctttcagtccagctgcttttctgttgtcttctgtgtgcttctcatttcttttgattcaggtcatcagatgacttggggaaagaactgtgtaactgtgtaactgctgaaaaatattggagcactaattggttcttttacagtaagaacacagataccagtggtcatgtttcaaaatataaatggaggaaactctttaatagaaccattcctttatagtaaggtgaatctttaacagctctgttctttgctttctgtctgtaaactgagcatgctgatgctctcatcattcctgctttacaatatttaaacttccaaagtcctttacagatttttttcccccaaagtggtctattctagtgttccttctgattttattgaacatttttatacttttcacaaattacaaagagttaaaagttaaaaatgtagtatattttttagaaagattagtatatgcagaaaagtaaaaagaagaaaaaaaattatgctcaatccaatgtattaaaagctaaaacagttctaagaggtaagtttatagcaataagcacctatattaagaaaggaaatctcagggctatccactatcttcagttttattcagctcagttttggaagtcctagcctcagcaatcagagaagaaaaagaaataaatccatattagaaaggaagaagtacgactgtcactgtttccaggtgacatgatactttacataggaaatcctaaagatgccaccagaaaactgccggagctcgtcagtgaattcagtgaatttgcaggatacaaaattgatatacagagatctcttgcatttctatacaccagcaataaattatcagagagaaattgaagaaacagttccatttaccatctcatcaaaaagagtacaatacttaggaacaaacctcagtaagaagataaaaaacttgtactcagaaaactgtaagataccaatgaacgaaatcgacagcacaaacagatggaaaaatatatttttgaactagaagaattaatgttgttaaattgactgttactaccattactaactgccagcaaatttggaaaactcagcagtggacacaggactggaaaaggtcagttattccaatcccaaagaaaggcagtgccaaagaatgctcagactaccacacagttgcactcatctcacactctagtaaagtaatgctcaaaattctccaagccaggcttcagcaatacgtgaaccatgaacttccagatgttcaagctggttttagaaaaggcagaggaaccagagatcaaattgccaacatctgctggatcatggaaaaagcaagagagttccagaaaaacattttttctgctttattggctatgccagagcgtttgactgtgtggatcacaataaactgtggaaaattctgaaagagatgggaataccagaccacctgacctgcctcttgagaaatctgtatgctggtcaggaagcaacagttagaactggacatggaacaacagactggttccaaatagaaaaaggagtgcatcagggctgtatattgtcaccctgcttatttaacttctatacagagtacatcatgagaaacgctgggctggaagaagtacaagctggaatcaagattgccaggagaaatatcaataacctcagatatgcagatgacaccacccttatggcagagagtgaagaggaactaaaaaaaagcctcttgatgaaagtgaaagtggagagtgaaaaagttggcttaaagctcaacattcagaaaactaagatcatggcatctggtctcatcacttcatgggaaatagatggggaaacagtggaaacagtgtcagactttattttggggggctcccaagtcactgcaaatggtgattgcagccatgaaattaaaagacgcttactccttggaaggaaagttatgaccaacctagatagcatattcaaaagcagagacattactttgccgactaaggtccgtctagtcaaggctatggtttttcctgtggtcatgtatggatgtgagagttggactgtgaagaaggctgagcgccgaagaattgatgcttttgaactgtggtgttggagaagactctcgagagtcccttggactgcaaggagatccaaccagtccattctgaaggagatcagccctgggatttctttggaaggaatgatgctaaagctgaaggtccagtactttggccacctcatgagaagagttgactcattggaaaagactctgatgctgggagggattgcgggcaggaggagaaaggggatgatggaggatgagatggctggatggcatcaccaactcgatggacatgagtctgagtgaactccaggagttggtgatggacagggaggcctggcgtactgtgattcatggggttgcaaagagtcggacatgactgagcagctgaactgactgaccattactaaggcagtctccatattcagtgtaattcctattaagatatcaatggtgtttttcagagaactagaataaataatttaaaatttggcatgaaaacaccaaagacctcaaatagataacacaaatctgagatagaagaaaagagctagaggaatcacatgtcctgatttcagactacactacaaagctatgataagtttagaaagatacatatgtcagtggaacataattgagagcccagaaatatagcacatgctgtggtcggttgatctgtgacaagggaggcagaaatacacaatggagaaaagacaatctcttcaataagtagtggtgggaacactgggcagatacatgtcaaagaatgaaattgcaatattctctaacacaacaaaggaaaataaactaaaaatagactaaagtcctaaatgtaagaccagatattataaagctcctagaatccgaacactctctgaagtaaaccacagcagtagtttttggattcatttgaaagcaaagaaagaaaaacaacaatacacaaataggacctaattaaatttaaacgttttttgtacagcaacggaagccatcaatagaagagaaatacagcctaccggatgtgaagagatatttgcaaatgatgtgaccaataaggggttaatatccaatgtgtataaatagttcaattaactcaacataccaaaaaatgattaaaaaatgggcagatgaactgaatacattttttaaagaggaaatgcagatgaccagtaggcatatgaaaagatgctcagcatcactaataatcagggaaatacaagtcaaagcatttgcatttgtttgagatagtacctcagtggtgataccaccgtgatgaaattccacgatagaatggctatcatcgaaaagaacacaaataacaaatgttggcgaggatgtggaaagaaagaaaacccttgtaccctgttgattagaatggacatatgtgcaagcattgtgaaagacagtttggaagtttctcagaaaatgaggaaaaaaagaactagcacttggttcaacagtcccactcctgggtatacatttggagaaaacaaaaacaccgtcaaaaagatatatgcaccccagtgttcatggcaacattatttataattgccagtatgtggaagtaacctaagtgtctatgaacagatgattggagaaagaagatattttgtgtacacacactggaatgctagtcagccattggcaaatgatgaaagattccatctggagcagcagaggtggacttggagggcatttatccaagtgaagcaagtcagagaaggacaaaccctgcggaagatcacttatatgtggaatctaaaaccacaggaaatcagcgagtgaagcaacaaagaagcagtctcgtagggaacaaaccagtgtttaccagcagggaaaggaagtggggaaaggcaacagagcagtgggggaaaggaatattgtagaagtgtgtgaaaccaggagtgtggaagttttgaaaattgtagagctatagaatttgaagaacagaatttgtaaaacactatagaattaatttcattcactggaagaaaaaaaaaaactgcacacagagaagaaagagaaaagaaagcccaaataaataactcaaattacatgtcaaggaacagaaaagaacaaactaagcataaaattagttgaataatgggaaaaacaaagagcacaaataaatgaaatagaaattaaaataacagaaaatatcagtgaaacaaagttttttttttttaagatgaaatagagacaacttaaactggatataccaaggggggaaaaaccaacagcactgaaatacagaagttataagaagctactatgaataattattcaccaacaaactggacaaattagaagtggttaagtttctagaaatatgcaacctatcatattaaagaaagagagaatatgagtaatctgatagattgaatcaggaaagtgctagccacgttctggcacagatggcttcactgattaattctgccaactgcttaatgtagaattaatgtcaaaccatctcaaactctcgcagaaaagagggcacatttctgttttatcaggaaagcattaccctgagaccgaaaccaggcatggacactatgaaaaagttacaaaccaatagctctgatgaagacagatgcacaaatgctcaacaaactgtattcaaccaaattcaataatacattgagactgtacaaccggatcaagtgggatttttctctctctgcagggatgtaagtgtggttcagcatcctgaaatcagtgtgagacactgcattgataaaacgaagggtgaaaatcatatgatcatctcagtagatgcagaaggaccacttgacagaattcagcatccattcatggtgtaggctctcaagaaacaggcatagtggcaacttactaaacgcagtaaagaccacatacgaaataccatagctaacatcatacttaatagtgaaaagcagaaagcctcatagctaacgtcatacttaacagtgaaaagcggaaagcctttttcctgaggttaggtggacaagaatgcccaagctcccctgcccgccccactacccccatccccaaggagctgagtattctttacttgggctgtatatcacagtttttgtaatgagtaaccatgagggaaagatggtgttcctcatattaaaagaaacaaccctaccaattttgtttgacataatactggaagttctagccagagaaatcaagaataagaaataaaaagtattcagatcagaaaggaatagaactttttatttgcaaaggtatgatatatatgttgaaaataccaccagaaaaaaacctgttagaattaataaattcactcagacggtaaagtgtctgcctgcaatgcaggagacctgggttcgattcctgggttgggaagatcccatggagaaggaaatggtaatccactccagcactctggcctggaaaatcccatggacggaggagcctgataggctctacagtccatggggtcgcaaagagttggacacaactgagcgacttcactcactcactaactcactaaagttgcaggataaaaaatcaatatacaaaaatcagttgcatttctgtacactgttttcagtggaggtgatgagcagattcaacaaattcgatctggtagatacagtgcctgaagagctatggatggacgctcatagcattgtgcaggaagcagtgacaaaaccatcccaaagaaggagggatgcggcaaggcagatggaggcttcacagggctgattgcggagcacgggagagagatggaaggcaagggagaaaggaaaggtacacccacctcaatgcagagtctcagtgaatcgcaagcagagaaaagaaagcttttaagaaaatgatgtgaagaaatggaggaaaacaatagagtgggaaagactagagatctcttcaagaaaactagacataccaaaggaacatttcatgcaaagatgggtacaaaaaaggacagaaatggcaagaacctaacagaagcagacgagattaagaactgctgtacgtttgcactcgttccacatgctacgaaggtaatgctccaaatctttcaatctaggtttcagcagtatgtgaattgagaacttccagatgtacaggctgggtttagaaaaggcagaggaaccagagatcaaatacacaacatccagtgtgtcatagaaaaaaacaagggaattccagaaaaacatctacttctgcttcattgactactctaaagcttttgactgtatggatcacaacaaactgtggaaaatgcctaaagagattgtaataccagaccaccttacctgtcttctgagaaacttgtatgcagatcaagcaacatcagttagaactacctggaacaatgaactggttcaaaactgggaagggagtatgttaaacctgtatgtagtcaccttacttacttaatatgcacagtgtatcgcgtgaaatgccaggctgggtgaatcacaagctgaaatcaaggttgacaggagaaataacaacaacctcaaatattcaggtggtaccactcaaatggcagaaagcaaagaggaactaaagagcctcttgatgaaagtgagagaggagggtgaaaaagctggcttaaaactcaacatttcaaaaaataagatcatggcatctggtcccatcacttcatggcaaatagatggagaaaaagtggaaacagtgacagatgttattttcttgggctccaaaatcactgctgaaggtgactacagccatgaaattaaaagatgcttgctacttggaagaaactctatgacaaacctagataactatattaaaaagagacatcgctttgctgacacagatccatctagttaaagctgtgtttttttcagcagtcatgtacatatatgagaattggactataaaaaggctgcgtgttgaagaattgatgcttttgaactgttggtgctaaaaaagactcttgagagtcccttggacagcaaggagatcaaaccagtcaatcctaaagggaatcaaccttgaatgtccattggaaggactcgtgctgaagcggaagctccaatactctggccacctgatgcgaagaactgactctttggagaagaccctgatgctgggaaagattgagaacacgaggagaagtgggtgacagaccatgagagatgagacggttggatggcatgaccgactcagtggacatgagttcgagcaaactctttagatagtgaagtgcagggaagcctggcatgctgtaatccatggggtcacaaagggctggacacaacttagcaactgaaatacagcaacaacagtgaactgtcagagaaattaagggtatagtcccatttacagttgcgtcagaaagaataaaactcaggaataaattttaccaaggagttgaaagatgtggacactgacgattataaacattgatgaaataagctgctgctgctgctaagtcgcttcagtcgtgtccgactctgtgcatccccagagacagcagcccaccaggctcccctgtccctgggattctccaggcaagaacactggagtgggttgccattgccttctccaatgcaggaaagtgaaaagtgaaagtgaagtctttcagtcgtgtccgactcctagtgaccccatggactgcagcccaccaggctcctccatccatgggatcttccaggcaagagtgccggagtggggtgccattgccctctccatgcaataagctgaagtatacacaaagaaatggaaaaatattctctgcatatggaagtgaagaattatgttgctaaaatgttcatagcacccagaacaatctatagattcagtgaattctgtatcagaagtcagctggcatttttttgaaaagcaatcctaaagtttgtatgtatccacaaaataccctaaaatagacaaagcactcttgagaaagaacaaagcggaaagcaccacacttcatgattttaaactttattacaaagatacgataatccaaacagcatggtattagcataaaaatggccatatagactaatgtaaaagaagtgagaacccagaaataaaaccacacttggatggtatattaagttatgacaaaggatctaagactattgattgggcaaaggatagtctgttcaataaatagtattgggaaaattgggcagtcacaggcaaaggaatgaccttggcctcccatcttacaagatatacaaaaatcaactccagatggattaaagacttgaacacaacaatttcagtataaacttcatagaggcagatgggataaactgtttcatattggtcctggcaatttttaaaaattactataaaaaacgaaggcaacaaaagcatgtatcagcaagtggacaggagtacatcaaagttaaaaatcacatgatatatcttaagttttattgtattatataaggtcaattgtatattagagtgtattattattttttaaattaattaaaaaaattaatataaaaaagaaacaagctaaaacctcctaaccctaccttgtagtcatgaactgatgtagtatttgaaaaatataacatagttttaaaaatttaagttgaatttaatggaggggaaaaatgacatgaaatgtaaatgattagtgaacttgagacttgatcctaagaggctttaaaatcataaatatttgatcctaacagccgtccagtatgaaataagattacgaaaatctttaaagactgtggacataagaaaatagtaaggctgatctgatggtagaacatctttattgcagaataatttattgaggtgaaattttctttaaacagtttctcctcattctgacctcctcccagtacctggtatccatcatcaatttgtacttctctgaggatttatctattttgattttcacttcagtggaattgtgtatagtatgtgatctttaatgtctgacttctttcacctggcatactgttttcaagttccatccatgtttcagcttgtgtcagctatatatcagtattttatgcattttcacagctgagtcatagtccattgtatttataatatactcggattccctggtggctcagacgggaaagactctgcctgcagtgcaggagattcaggttgagtcctggggttgggaagatccccgggagaagggaatggcaccccactccaggattcttgcctggagaattccatggacagaggagcctcaaaggatttggttctactttttggctttgagaaaagtgccgcaagaatttatgtgcacgtgttcatatttgagcccctgttttcagttctattaggtctatacctaggagtataattgcttggtgatggtgtaattctctattcacttttctgaggaatcaccaaattgttaacacaggggctgccacggatcatagtcccaccagcaatgtatgagggctccagtttctccacgtgtggttgacacaggttattttccattttatttgaaaattagaatatgatactgataaatgactttcagcaaaataacactgtaaagaaatgatttatctccattatttcttatacagtgattatacatcagttcagagtatctcttaattctacttcctgtcccggattaactgaccagtagaaattgttttccaggagaacaaatttctactgttcttcattttctcaaaatcatactatattttgcttcatatttctactgtgtctctctttttttattctgcttgtgtgtatagttctttgtttttaacagactttctaattaccattccttctgcttaatgctcagaggaagtcagtctgtgtgtctctatttatgggtaacaccacagttgtacttttaggctttaaaatgcatgattttaaatcataaaataactctttttgtaaggttacctactctcttgctgaagaaataacgtcacttaacctggaccttctcttttgatatggaccagaatttccttggcctttagttgatgtattgttctcagatttctttttattatattcctgggttagtactcatgtttgttgtgtcctgttattacaattgaaacaaatcctcataaagttaaatgataaaagataaattttctgaattatgcatattagaaactgggtttgttttttttttggttctcacatttgattgacagttttgctgggtatacgtttctaaatataaaataattttcctcagaacgttgaagactttgctcagtttgtttctaacatccattattcttcctgaaaatatgaacccagtctactcattgaaaagttttctaagagatatcacagtgaaaatgaaacagaaaaattgttaatgattttgctttttagagtacagaggttgataagtaagataatgaaaatatgtagctggttaggtagtggggctgtgaaggaaaacagagcaagaggaggaggatagagagttaatcttacagggagactggtgtaaattaaattacatgggacggccagggagtgcctcccttggaaggcgacactggtgccgcttcagtaaagacgaggaaggaagcggggtgtgcagagctgcaacggctctgatgtaggagtgttgctgatgtgtccaagagtcaaccgagtggctggcgtgactgcggcaacttgagggatcggttcagtccagtcgctcagtcgtgtccgactctttgcgaccccatgaaccgcagcacgccaggcctccctgtccatcaccagctcccggagttcactcagactcatgtccattgagtcggtgatgccatctagccatctcatcctctgtcgtccccttctcctcctgccctcaatcagagtcttttcaaatgagtcagctctttgcatgaggtggccaaaggattggagtttcagcttcagcatcagtccttccaatgaacacccaggactgatctcctttaggatgtactgattggatctccttgtagtccaaggggctctcaagagtcttctccaacaccacagttcaaaagcatcaattcttcagtgctcagctttctttatggaggccagcactccaggcctcccagtccatcaccaactccttgagcttactcaaactaatgtccattgagtcagtgatgccatccaaccatctcgttctctgttgtctccttctcctccctctttcaatctttcccagcatcagggtcttttcagatgagtcagttcttcgtatcaggtggccaaagtattagagtttccacgtcagtccttccagtgaatattcaggacttatttcctttaggatggcaagtgtcttttactttcatggctgcagtcaccatctgcagtgattttggagctccccaaaactaaatgtcactgtttccattatttcccatctgtttgccatgaattgatgggaccggatgccatgatcttagttttctgaatgttgcctagtagggatcaaaggagagcggtgactgggagtgtaggcctttagagatacatacttggcttttatactgaatgatattggaagctattggaaagtaagtatcaacatctgatttatagtgtaaaggaattatatgcttccaagttgagaagcagctgtagcgggagcaggggcaggagcagacggtccgtggagaaggttgggagtgagagagcactgtggtgtgaacaacaggacttaccgatggattggattggagttatggcttttgagatttgagatatgaagaatggcttcaattgtgtctttggtctgaataagagtttaatttaatgatgagggagtaggttatgagagaagcatacttgggagagaaggtcaggcgattggttctggaaatgctaacttgaagatgtttattatacattcaagtggagaggtccaggagacagatcctgtcctagagttcaggggaaaaatgaaaaaaacaaaaaaaacaccaccaccctagaagccatcagctgtagatggtatctttaaaggtctaatgttgatgcaatctggtagatacagctagagatggttgaaggcctccaccttggggcaccttaaatgaagctgttggaggagaggaattagtgcaagaggccagggacgagaaacagtgaggtatgaggaagatgctggctttcggagtaccttgacagccaaggaagcccagtgatgcgaatgtatcagggaagtggggtgactgtcagtgacaagcggtgctgaagtgtggccacatgtggactgtgaattgattgttggagtcatcaatgggaggagagcggtgactttgagaagggcagttccaggggaggacaggagtcttcctggagtgggttcaaagtgtaggggttttcaatacaagatgcagtggggtcagggtgaagtggggtcaaggtggagtggggtcaaggtggatggagcgggttcagggttgactgggaggagaaacatgactggcagcttaagagggatgctgatcaagagaggattttttattttagtagaagagaagcagcatgcatcagtattgagaatgccctagagaggaatgaactggtgatacaggaaatagtagagaattgctgaagcaaggtagacatgtggagagattagcctttgataagcgcatgggtggtttatcctcagtagcaggaaggaaggaagcatacacaggcacagatccctctgtgaaaatctttgttggagctttgtgttacttctggatagtcacgtaccacaagcatcaaggctcatcctggctagctgccttccacttctgggtagtcacacttcagaagcatcatggctcaccatggctagctgccttccacttctttaggcttctccttttcagcttaaccccttcatggtttttattttggcaatgtaaatcaatggtggtttccagtttaggaattttgtgtttttaaaaatattatgttactgtaacaaagacatacaacacggatttatgagtgattcacatcttgaaacttttgagaatcctcatatgtgcagatatttctggggtatgttccagagaactaccagttacattaagatcagaagcggaactgctttctcacaccagccgtaggcagcttgtggttcaaattcacttaccaggaaaattataagttacttcatgttttggattgcttgaacacaggtgaaatcatgaatgcaaacatctgttaatgtcagaagtctgttttgttccttatgactcatatctcttccagtcacctcagcccaggtcaagaaatatgggatacagtgatagctttagagttccagcattttttacttgctaaaatgtgatctctgggatcactctcatttgtttctgaaatagaataatgttgctcttcctacttattcttttttttaaattaatattcatatttatttatttggcactgggtcttagttgaggcatgtgggatctagttctctggcaaggatcagatccacagcccctgctttcggggcttggactcttagccactgaactaccagaaagccctgccgccctcctcattcttgctcgggagcccggttcttaatagcagtgatacttccgctctggctgtagggcctgctcacgctgtcttggggcatggttcccgcagcttgcttgctgtgttccagcgcagtggcacttatgttagggagggtaacggctgggaagggcagcagagttatagctggcccttcagcaaggcaggttggaactgcacaggtccacctgcacatgggtttttttcaatagaaattagtaaataggagtacacagtccatgattggttgaattctcagatgcctagcagtattggatacagacagccaaccgtaaattatactcagattaacccctgaattattcaagggtcagttgcaattgtgagaccaaaagcctgactagccttttgcttacttttcctcacagcacttttagtgagtccctcttgggtttaaataactaatttccattctttacagaccctaccttttccaaaaacctggaacaagttccttggtcccttgaccagaagacattgtgagtggtctctcctttacacgcacacatctgcgtgtcttcctggggtgtgtgcgctgagagtcggtgggtctggttccccatcggtgtgctcggtgctctctgggagcacaggctactacaggagtgatggctggaaataaggggactccggcttctcacagctttactctcattccttctgaaggcagggtttatcttacagctttattctcattccttctgaaggcagggttatcttattgcatttcctgttaagcaaaaacgaaagttcacgctcatttttcgttgggatgtgcccacactgtatcgtggcctgacatgtgacatgtcagtgatatttgtgctttgtccacccagtgcttcataggctaatgcctctgaggagggtcttcagggagtgctcctttttgcagtgtgtcacagactgctccttcgctgtcttcttggctgagtccctgttaaatgactttattatttaacgttgtttcacttgccatctccttccttggatgtttcatgtacatttctctagtaggctgccgttttgtcatctgtgactttgcttctctgtttacgttgctgacttaaactggtggcagtgactttcctattataagtacaggtttgtttttaaaaaatcccagctatctcattctgacacacttgtgttcctttgcaaactattagtgaaggccattgcccaacctccaagtctattctaatagtttttctaggttaagcaaaataattattgtctctgtgaggttttatgtttgtggcatattttgagtaacacttagggatggtttttcttcaatattttcatcacattaaaaaattttaagtgcagaagaagtttgggagtgtcaggaaaaaaggtgaaaggacagtgctctattcatcaactctaaaatgtcatcagcctttggagtagctgccgctaagttgctccagttgtgtccgactctgtgcgaccccatagacggtagcccaccaggctccctcgtccctgggattctccaggcaagaacactggagtgggttgccatttccttctccaatgtatgaaagtgaaaagtgaagttgttcagtcgctcagttggtgtccgactcttggcgaccccatgaactgcagcccaccaggctcctccgtccgtgggattttccaggcgagagtactggagtggggtgcctttgctttctccgcctttggagtagaatcaatttgaattcacctgttcatctgatcaataagtatttattgactgtttactctatggcaggtactcagctaacttttaaatatgtcattttataatgttcttttaaaatggatgatgtaaggagaatcaaattttctttttattttttttgtgaagatcattgtgaattagttttcagtgtacacatacatatcagcagacgtaactcactttttgataatggagaaactgccaactctagataaaaatgaaatgtggaaaatacagaatctgctttgctttctctgctccttattcagttttacaaagacacatgcaatgtgaactcagccagcactgtcacctgctcttcctgcggttctgctagtctctttggaaactggtggacttgaaaggagcatcatgaactggaaaggagaagtcagatgaacatataattcagttcagttcagctgagtcgctcagttgtgtctgactctttgcaaccccatggacggcagcacgccaggcctccctgtccatcaccaactcctggagttcactcaaactcacctccactgagtcggtgatggcatccaaccatctcatcctctgtcgtccccttctcatcctgccttcaatctttcccagcatcagggtcttttctaataagtcagttcttcgcatcaggtggccaaagtattggagtttcagaacatataattagacaaattgaaaatgggtcctttataattcagaagtgactatgtttctatattacatagaagtttgaagtttttattttagattattcctgtttaagaatactttgtagtctgtgaacagctgatccatttaaaggggatttttaaaattctttaatttataatgatttgaccattatgatacaaatattttattactgtgacaaaataaaatttctgttgttaaaagtatgttttaaaaattttacaaatttcttgagttacttaatttcttcagtatgtagggaatattgactgaagatattcttgaaagcctaaattacttggaatatatatgaaacctctcttatgtacttctgttcaaatgttacatatttttggatcatttacagtatagactttaagtttgaaattttacatttttagttttataaagtcttataaagactaaaaatatttttgttagtactattggaactaaaactaaataattttatccacataattgtccttcagctgtagctgtaaagaataaaatttcttgaaataagtagttatttttccatttgaaataaccatttaaaaatatttttcatctgtaacatgtattttagtttttataaatagcacagagaaattgaactagttatataactaaggttatcagctcaagttcagtagtatatttgatattattaggctgagggtatttcataattaaaaaaacaggttattattgcttttgtaagtacatgtgcttttgttatatcttgtgtgctaatctaatttcttgttgaagtcactgattaaaagggaattgtgaaccatgaggttctgaaacattgacgtgattttaatctgataacaaatgggtttaagttcatgtactttcagttgttggcaacaaatctaacctgtattttttggatttatgaggataagtcctgctttggcaatcttgtagatcctcaggagaatagttaaacagtgattaatcattgtttcttcactgagtgtgcagaaaagaatggaaaagctgcatttcacacttctgaagcaattaatccccatgatcttagccaggtttgtcttgtagataagtcgggatacgaaacgctgcctaatttatcaatgtatgcctgccataaagtataaaacacacaatttatttcatatcatttatagtcaaatgtaaaaaaagagtgactttgccatctccaagagtgtttcctgcattacctccatataaactaagcaccggagattacaatggggctcctgtttattgtgcacagctgctgcagtcactatgcattttctcattcacttgctggcatttttagtgattgtggcataaatcaccttgctaatcagaaacataagtgacgggaagtcatctcctttttttgaacaatgggaaaaaacatatggcttcttcgacaggacttggctgttatactatttatgtggcattatattctgtatttagaatttcatattaattgcatggtttgattgaaggtgttgaacacccggggcttgtggtcaaagtatttattttgtatccattttcataacaagtaaacaaaatagggtaaaattatatgccttgtattaattttttaataaaagctactttgtgaacagttttaagattaagacaaattgaagaaaatgtatatatttgaaaatgtgtgaatgtttctatagatgcatagatacagtaattacaagttagtttttaattctacctgtttcaaatcactgcatagagtaaaaagttactgtcctttaagtactaaactataattgacagtagtttgcttttctgcgagtactatcatttcaggatgggttgcattttatgattaactgctgttcattagttaggacatacactgtatatgctgcagctgaagatgcatggctgaaaggagtttctgcgtgcactgcaggctttacaggatgccctaggtggatttggtgctgcgtgttacagaatgctcactctagattcggaggtttccctgtttccctccgtaggtaacttaattctcaaaaggcattgagtacaacggcctttcacactaacctgactttataatcctttacctttctagcccttctcagcatccgttttcttactggtgggtggcaggagaagacttattttgaatgtgtgaatttcaaagggaattttatttgttgagaactttaagtcttttaaaggttgttctctatattacatttgcctataaattagtgaggtcagttttaaataagtgtatcatagcctgtttatttaaatgtgttattccctttgaaatagtccccttgggaagatgtatacatgatccattaatcaaagtattttagcagtgcctcttttcagattcagtggaattgatgtatagctgcccaaaatggatattttgaagggagataagactcattttgtgtatgtatgtgctagtatttttgtttaaaatcaatcaatcaatcataatggcttgtattgcagtctgtatatatctgtagataattggacgctctgaatagaaatagagttttaaaaaactgcctgaattttaaataaatgatcatatttatccattttgttttagaagtcttttatattattgtctcaacgaccacctgcagtaggagcccacaaactgagtaaacacaacataaggagagggtgttttcccccatgttgtcctggcttatttcaaaaatgtcaccatccagattctcttagagaatagtgtactgttatttaaaatatatttataacagaactgaggctagattaaaattatccagtgcttaaaattacctgaaatctataatctacaatagtgcttcaatccttgttcatttttattttctttattcttttaaaacctcttcccctccctccctcaaatatctttttttaaaagattgagttgtatttgttgtaaagattaatttttaaagtcataaaaattaaaacgtgtgtgtgtatatgtgtgtgtgtgtgtgtgtgtgtatacacgcatactttttctttaccataatataaatattctaggaggattggttgtcaaaatccaaaaaaaaaatgcaatttatgagatggctaaaagtatcaaaatagattagaaaaataaggagctctatttttagtggctgaacactttgggatttgttagtaatggagctttcaggaaatttttctttcatggaatgcttgtggtaagaaatatataatcataaattatttgcttattcatcatgtttataaagccaagggtttaatttctaagtgtatatcaatttttgaatgaaattgaactatcggtaatatttatattcattaaacattttctttaaaagtttgttttttgttttcagagaatttgcattatttttctcctagttagttctttgtcttacttacatttcttactttgttggtccctattactctctaatgtagagtctgaatccagtgtggaacttgccagaagagttcttgttcttcccttgtgttctcgtggcatgaagaagggaccctctctttgcagggaagggcttctggtgtccccaggcaggcgggttcctgctcgcaggcctctctctggccattgtctcccccctggtgttgctctgggagcgcctttggaatcccaaccaatgggaggcccaccactgcccgacactgtgaggcaggcgacaggaagctgccggcctaatcatactagagttcagattcagaggttaatttgtgaaggaattccccaaaagggaggctttcatttgtcagcagtaaagctgctttgagtgacacattatttaggagttttaatggagagtttttaatggaatatattaagtatgagaagcatggagcacgaaaaggcattgcatgtttcgaaagctgcgtgtttttagtgtttaagactccttctgagtagcatgtccttggtgtgggctttgcttgtgctccttgaaggagttcagccacatctttgctgtgtaggaacaaagtggaatattttctaaaaagaaaagaagtaaagagccagacgtggcgatgccgtctcagctgctgagaaggaacgtttcggagtttggcaggggtctgttctgctctctggtattgacctttccggcctggtgtcagtggagctggaagaatacttgagctgtgagaagatgacgtttagaaagagcaggagaataaggagaagtatcatgagatgcctggggacaagtggcacagcacgtgtgcgctctgaactgagagcccagtggaaggagtgctttcccctgccagtgtcccgagtgcggtgtgcacacgctctgctgtgctggccgtgccaggagggcgggggctccctgggcgacagccatgctgcccgcgacagcggccctcctagagccgcggggaggcgggctgcagaggctggggcctgtgggggacaggcgccccccgtgatcagcagggcagagcgacctcagcacctgggcagggaaaccagaaccagcgcctcagaggccccccccccaagaggcacagagggggtgactggtggatgtgtccagggaggtgaccgtcagctgactgatctcgcttgtgaacacacgtgaaactcaacaggactcccagaaatgttggagaaacagtttgcaggggcctggcctcctggcctgtgggttgtattagtcagagttctccagagaaacagaacccaaaggatctacatttataaaagagggcaatcagctcatgcagcataggagctaagaagtcccctcctctgctgtttgcaagctgaagaaccaggaacgtctgctgtatgtgattcatgatgtgtccgaaggcctgagagttggggtgatggcatgggggatggaggaagggactgaatccagatctgagtccaaatacctctacgttagctcagagcacgaatttgcccttcttcaccttctggctctgttcaggccttggatgtgtttgggtgatgcccattcatgttggcatcctcactcagtccagttcaaatgctggtctttcacggagaagctcacacagacacactcagagtgatgtcttgctagctgccttgatatgccttagcccagtcatgttgacatataaaattaaccatcacaggagagaagatgaaaaccagcaagtgtgaattacatttcttttgtaaaataattcacaggtttattgaggtactaagaatcttttctttcttcctttttttggaaagatttctgtccagaaaaactttggcttatgtacttattactgcaaacagtattctaggatcaacaagttaaaatatgattcttttttctaggaactggcagtttatagaagggagtggcattaaaaaaaattaacatctagtgagatgaatgaaatgatagagtcgtggatgaaagattgtagactacaggaaaaaaatacttaaagcagcttggaggtgggactgtgggctggttccatggaggcttccagagaaggtacagactgagctctgtgtgaggcatgtgaagatacacgcttcaggaggagggaagcgctgcctgcggtggcccagggatgattacaaagctaaggtgtatttggggagctacacatagttcaggttcacctgttgggtaatgttgacatctgagattgtagacataaaatctagtgttttgaagagtcttgtggattaaacattaagaatatgggccttctgtcttggaggaaaaaagaaaagaccaggggagacaggtggggtagaaagaacctcagattgcagtgttaggcattgtgacttactgaaggaatttaaggcagagagtggtgtggtcagatttgaattttagagcccttaagtgacatttaagcatttgagtgattggagggagaactcaagagtcagactactagttaggagactgttgcagttggtcagggaagatttgagacagcagtaagggagtcaggagtaaatcagagtggtgagtgagtgagaagaaggggctaatataggaggtagaattgtctgggatttaaccggtctgaggtgagggagtcaagacgaaaatacaggtacttggctgtatcttggtgtcttccatagatgatgagcccaagaggaacattttgaaggggaacaggatgacctctgtttgggcgtattgttgattaaagtctgaaaggatggaacaggtttggggccaagactagtggaggggttcatttttataggaggagggtgagtttttctagctgataatagtaggaatagtaaagtagtgcctgtggcagttcagaagccgacgctgagatggatatggaagttttgagaaatttactggagggagactttgggaggtcagggggagaggggtcaggagtgaggtgggaaagcttcagaccacagtgcacatgtgatgtctgtgatgagagaagaggacggaaagcaggccggggaagagtcagataccagtgccctttggggacgtcccagcccccctggtggcgagggcggcgggtggggggagagcccgcgctgcctgactgcggtgggtgcccggcgctctgcagcggtgggtgcccggcgctctgcagcggtgggccctctctctgcgggggcgagcgccctgctggagcctgcaggcgggaccacgggaggcgccccttccagcaggtcgtctcagggtacccctcccgacgactgctgtgcctcagttggctgaagggtggaggggcttcctgttggttcattgtgtcctctgctctcagcacgtggagccagaaatcagagaaggtggctgagcctgagctagtgtcggaggcttttcaagaactgatagacgcggggcgagagaggacacagtactgggaagacctcagatagtctagttcggtctgataggggaggaagggacactggaaagggcggagggggttgaagtcaaaggactcactttcattgagtttgaaagcacttgttctgattgagggactaagggagcttcaggatagagaggactgtggagataaagtggtgtattcatttagatgaatagccaaacttcaggaaatacacataaaacacataaattccatcatgtgaattgagagtgaaattttaaccaacaaaaaacaaatgacagttatcatcatgtgatcacattgtagaatgtgtgcatcgtagaatcacacaccatgcataggcatgaaagcatcataaatacttagctttaatagtcttaacttttctgcaaagtaaagttccaaagccacttgtcaagtgtcttaattaaagctcactgtttattttccctgaagaacttggttttctgtgagttttttcagtttatctagtaaccttaatatttcaatgtctttttcttttttttttttttttttgcaaaagaggaaaattgagttctctcctaaagggtttgtgtctttatactccataggaaattgagaagtgaaaaaacgttcaaagcacatatagctaaacatttcttgaactgaaagaagtgaagataaggtaacagttttgaatacatacaaacaacttttcagtagctgtccctttgcagaagggaatcaagagtggcaaccagtaattgaagtaattaaaatactgcagtatgatgaattgacagaatgatggacagaaaaatggactttgtgctaaagcaaatatactaaaatgaactgaagattgtaggtgggtgttcatcttttctgtatatttggaagtatttgtataagatgttgaaaaagtagtatcatagcatctgcaactttgaaatgcttaagaaagtgatggtctgatggcttgataaataaattataaaaccactaaaacatcagttattagaatctaggtggtgagtatatgaatggtgactgtaacattcttgcagactttgctgaatttcaaaaattttcagaagaacatgttggaggaagagtgccacaaacagaacactgactggccttaacgactggctctcggagctcgagccgcgcggcccgaggcaggagcggggggagtccccacaacgcgctgctttcagaggcttggcttgcgtctgctctgcagtttcgtctcaagcgactggcaaacggtagccatttggaaaagcctctgatggttctagactgagaaactccacatttagatgtcctcttggttttgggttaatgtgtttagaatttctgcacgtatgggcattgaattatttgatggaacagggatgagatgagaggtcaaggtgcaaatgttgataatgaagactgctcagtttcacacacactgtctgtgtcccatggtccagagcctgaatgtttcctgactcagtctcccagctaatcagagcctgagctcggatctcctgatgggatcttagaaccgtctttatgcaaaggatagaatttctgactttgtagtacttatcaaggaaaacttgacggcctttaaaaattcttgcattttgtaaattgcataagttcttcaaaggggatttactgtattcctatcttaattagtagttccatctaaatatatgtataccatacatcagtgtgaagttttgtgaattatgttaattttaatgtagaatatatagtaagaatatgtagtaagtgtaaatcactttttactgctaaatatatatttttatgcatattgatataaatatttactacttactattcagtagtaccttccccattgatgactttcttttcctttttttgtcttatgaaagtcagtcattttttgatttctttataagaaataaacttagggttctggcctgtttgaactttggcctcaagtgcatttataaagtacaatctcttgtttttttaacttgctctgtttcatatgcagggtagataaaaattactgaactttttatatttatgtaaatttatttaaaattgaattcaaatttactaccatatgcctcaaaggctaaacataatatagactattataatcatttatataaattggttttaaaaaccagttcaatatgttgaatcaatatgtcatgaatttcatatctatatagttgtcatcagtaaattcatggcatgtacttttacagcatacagatcttaaataaaattgaatagacttttctagcctacattatggaataacttctgttttcttccagttgactgatttagtattagacaagaaccatgctatgctttgtatatccatcaaatcactttttaggcaagtctttctctctcagtaatacttactggttgtctttcacttgctggtctctgtgtgatgcaggataacgtgggaacactcacttcagggggttgttggaagagcgctgtgcttttctttctgagggtgtgcgagtctgtggcctccccatcatgaagcttgagggaaatggcagcacctctgagtgcgtgttcatctgtgggtttagttgtgtgttctgtccatgctgagagtatattcactgacctgtttttagagcgaatatttgatttttttcccatgtataaaatttatagaaactttgttctttaaaacatgtatgtatacactattttattaatttttgaagtatagttgatttacagtgtgatgttagtttcaggtatacaacatagtaattggattatagattatactccatacaaacgtagtgtaaaatattgactatatctccatgctgtacattacatctttataacaaatctgtttattttttgaaattaaaaaagtatcttcatattcacatagttaggcatcactaatatactctagggttcaaatgttctgtaattcacatgagtaaaaatttctgcactagtacagtattggcaacttttggaaaggatatacgtaaggaaatattggtctacaaaaacaagcagacttactcttgagcaaaccctagaataagagtgatgagttataaaatagtaaatatatttcctgttgtcaaagtgggcttcccagtggtaaagaatctacctgccagggcaggagacacgggttcaatccctgtgttgagaaggtccctggaggacgaaatggcacccgactccagcgttcttgcctggaagatccatggacggggagcctcgtgggctgtagtccatggggtcgcaaagagtcagacatgacttagagaccaggcatacattgtcagggtagaagaggaagctgtttttttttcttaaatgcagatcttttatgattaaatttatatcacttaaattctggtgaaaatttcaagtgtaggaaatttcatgggagcaggcgttacatacctttcgttggccttgaatgttaagcagagcattatattactatttctgtgtaattataaaaataaagtaattttaatgtaacctagaagttaactgctatttaatgcttaacaaagacatatttaatgacagtgttttcttttcataaccaacctgtgttaatatatttgacctgccattttttatgtttatgaagaattagaataacttatttttaaaaagagtgatatataccctttttagggatgtgtcattttctctgtttgctcagtagaaaatgacaatttagtatatttcttatattcttatagaatttattttcttaaacagatgcttgttaaggtcatttttctgaatcttttcttcataattaaaaattagtgaaacatgtaaaaaaaaaggttcatgtttaagtggtcatcttcctaaatgctccctcgaacattattaccgaagtctcctatagtctatgaagggaacagataggaagaaaagaattagtatcctgtcttaattcgttgttttgatccagtaggtcagggtctttaattaattttgtgttatcctagaattttatacctggatcctttttgtccttctggccttttttttttacttttgtgtggtttttgccttatcaaatataggtatattttgtttatttagaccaatttctaattgtcttcgagaagcattgaaagctgaagactcgaagtaatttattttcagtgtgtgtatttactgctgtgctgtatatacattttatatttatgtcaggaaagggttgcagaggggtgctttggaaccacctttccagctctgaatagctattgtgtacatatggtaaggtactgctgcttaacaattagtaactgctttgatgaaactaaattacatgtttaagctcccatcaggaagtcgcttcacatatctgtattaatgtattcaaggctcgagaaggaaagttaattttccagcttaaatatttaattcaagcttaaaatttagtctgtaattagagctcccaaatggcaggaacatggagtatttgtccattttaattagattgttgtttacctattaattatatatcatatcttgtcatatagttttgatggtaacagatggtgctaggagttagtaagggtttgaacaaaataagattccacatgatttattaagttgcactttattagtgagtggtctgctttagtcagggtattctcccaaataagaactgtgcaacatttcactaattttgatagttattcttttgtagaaatgttgaagattaagtctgagacagtgatgtctgtttagaaacaaagtggattatttcaggattctttctttttaaggagtatgtattgtcagttctacaattggtatgaggtttggtgcattttgctaagatagcatcagggaatcagaattttatttattggtaaaaatgtcgatgtagggaatgtttgtatatatgataatggtttaaggtctgagaaataatagggtgatgattcacttatttatttcaaagacattgattctctgcctattgaattttttaacaggaagacaagatattttgtttaccaaaatatctaagagcagactctggtgcctagtgaagttgacttgccagatttccatattcaaaaagttactgtcaactaaatagaatggccttctaagtctgcttatagaagattttattaatttctgtgttagtaattcagcttcctaaaatgaattacttacacaaatgcacatatgcaaacatgtatagagagagacagaaaaacccagagtggagagggacaaggggagaaggaagagagggttaagagtttaattttttaatcttatatagtctgtttgaaatctattctcatccttaatatcattaacttaaaagtacatttggttgccatttcttccggttctgaggccgtaaaccttggtcagtgttttacagcaaaaattaggtggtaggcccagccccgcttctgcttgcagtgctcactctggaggggcctcctgctatttatcaggtctccaacagtatggccttctgctacccatgctaccttcagaaagcagcagtgtttgggtttgttttatttcatttttatatcttggtttgtctccacttaaaccctgccaatttttagaaatgtcttttggtgtcgtaactaattcgtcatgatggggccgtgttttaatgctgagtgtacgattccacatgtaactgtagactgttacagatctgtgatacaggactctttaattgtatgaaatggccatgtaactggaatgagcactgtaatgggcttttccccctagaatgttgatgcttaaaacctaatctcagattttgtgctataatgtcacaatgtaggaaggatgctgtgttagcatttatagtaattaaagagaatatcaaaggggaaaattgttatttagaatacatatagctgtagtttgaaagtttgaattttagcatttctattccttgtgaaactgtggtattatatatttttttagcaaaatttatcagatgtaacacgggcatacttccacacaaaatagaaaactaaattgaaatgtataagtgaaattaaaataattgctaattaattttaaatgaaggaaaagacagttatattttataaaggaatgagatgataacttgatttctttgtttctaaagcatatgaaatatacaaaagatacattttgttttatctggagaaatagtgaatgaatgaacaaataaatgttgagttttaacagaaatagtgtgtgaaaacagaaatgctgttttattttagcaaagagattttcttttgggttttttattttcgcccaacccttcactaccactttatcccttgggaagacctttatttcagtcaccaaccatgtacatatataacttttccaaagaaaatggcaatactgatgctttttctggcattactaagattctttctttctttccttaaaagagcagtatatgaatactagcaaaatgtggctgttgataaatcagtcttattccttgatactgatgtaaacctcattggatttttggactctttattttctttttttttttcaatcaatagtagggtatcactatgcagtgtgataggttcaaagttaaaacaatgtgtaagaagggtgttcaagagttaagaactcatgaattgacgtatggacgctaatttttttttttaagtacagagcttaaaaaaaaaaaaaagagcattgtcctgtgctgagtgcttcagacagagaagcagatttgatgaggtgcttgtcactgatggtggggcacccacggcgagcccagaagcctggtgaggagaatgggtagatgaagacgtgaaggttgttagaagcactcaggcttctcaagcattcccctacactgctctgcttttgctttgtttcttttgaacaagatgaccttgactggaactcctacctaatgttgcttcaagattcagttcaaattgtctttcttctatcaaataccttaatttactcttttcttggcactttgtttatactcttgtcatgttgaattaaaaacatttgtttacatttctgtgttctttactgtcagctcttgtggcatgagggcagtatctgacttatatttttgcctctactgtttttagcacagtgaggggtcataataaactctggtggaaggaatgaataaaagcatttcatgtcatagggtgtggctgtagtaagagttagaatgctgtggatctatgtgggcgcttgtgaattttttttgacttttaaataactttattttttttaaataaattgtctgggaggtctgttttattcattttttttcccatcctctccccccaagataaatgatttttagtttttgctgacatgtaagcgctccatgtttttggtaaagatattgtagttaagcaacatggaagtgtgtacagtttaaaactacttataattctttccccagagatggccattttttcttgtttgtatgttcttctggattaccctccttccatttttaatacctttctgtctttctccttttattttcctttaaaaattttatctatctaagccctttaaaggtgcttttgaaatataggttcatcattggaattcttctcagactgcagaatgttctttgataatcgcagcagacattttcagtacttcgggttggacttttctccgtttttgaaatttgttttgcccttgcttctgtgatacggcacattcctggttgtttcttgattgattaccatatctctttgagctgcttttcctctgcctggattttaagtgtttgcatttctcaagatccggtgcttttctccatcactacacattcctcttggcagtatcatctgtccagaacttcgggaagcaacttcatgtgactctcgagttgacagctccagctgagaggactgttgacctccacgtccacttacctcactgtgtacgtttactatgtacgtgatgtttctgtacttaagctttcatggtagttcttcagattcagcagatctacaattaaagtattctgttctggcttcatctggtcttcttgtagttttcctggtgtcagtaagtaatatctttctttgcagttgtgcaaccagaaaactcctaattataatattcaacccatcaacaagtgcccctgggtcatattctaaattttaatatagctatgggtctattctggaattgactttgatctgttatctgtttgtccctccttacacagaccttacactttcagatagcatggctcagctgtggcttcttcatcttgcaaagctgtctccttcattgtacgctgcttaaataggccctgggtgtgctcaggcagttaagggctcagcacgtctgttaagtctgccaccttctgccttcacagtccctttggagtatctgttagaactgtattagaggcaccggtgactttgaggagaatttatatcttcccagtaacaagtcttctcatccaggagcatgtgcatcttggtttaatcaaacgccgtttcaaacaggccacacgttttctccatcaggattgttcacagtgcatgaaagttgccgttgctgttgtactaggatagttcctttattttctttgtggttcatctagtgttcagcatagtccctggcacttcactttaatacttactgaatttcaagcagttttggatatattttttaagtttgtagttttaagcattttataaactaaaaacacttttaacttatgtttttgtagataaatgacagttgtaaattatagttttttcttccttttaaattttatacttcttgttttatttatttaacctattggggtagctaaaatctccttaacaatgttgaacaaaatagccaatatcttgactgtctattaagagaaatgtatttatgttttaccattatatctgctatttgtgtttcttttccaccctaacaaatgctctattaaagaatggaaggtggtgggtttttttcccttaggttattttttaattaggaatgagtattaaattttatcaaaggtttgctacatttaatgaagtgatattatgatcttttcttctatagcttacttagaaaatctattaactgatcatataatattaaattgcccttgcatttctggaaaggacctgtattggtcacgatatactgtgagctcattcattcttgtgctctctttgtcacgtttgctgttacaaagtcatgctaacataaaataacttgggacatctccctttcttacaggttatttatagtaggaactattaactactttcagttcagtttagtcatgtccagctgtttgcagtactatggactgcagtatgccaggctgccctgtctatcaccatctcccagaccttgctcaaactcacgtccatcaagtcggtgatgtcatccaaccatctcatcctctgtcgtccccttctcctccctccttcaatcttacccaggatcagggtcttttccagtgagtcagttcttcatatcaggtggccaaagtattgcagcttcagcttcagcatcagttcttccaatgaatactcaggactgatatcctttagaatggactggttggatctccttgtagtccgagggactctcaagagtcttctccaacaccacaattcaaaagcatcaattctttgacactcagctttctttatggtccaactatcgcatctgtatatgactactggaaaaaccatagcttttactagacaaacatttgtctgtaaagtaatgtctctgctttttaatatgctgtccaggttggtcatagcttttcatccaagaagcaagcatcttctaattttatagttgcagtccccacctgcagtgactttggagcctaagaaaatcaagtcagccactgtttccactgtttccccatttatttgccatgaagagatgggaccagataccatgaacttaggttttttttttaaatttattcattttttaactaaaggataattgctttacagaatgtggtcttagttttttgaatgttgagttttaagccaacttttgcactctcctctttcactttcatcaagaggctgtttagttcctctttgttttctgccataaggatggtgtcgtatgcatatctgaggttattaatatttctcccagcaatcttgattctagcttgtgtttcatctagtccagcattttatttgatgtactctgcatgtaagttaaataagaaaggtgacagtatacagccttgacatactcctttcccaatttagaaccagcctgttgttccatatctggttctaactgttgcttcttgacctgcgtacagatttctcaggaggcaggtcaggtggtctggtattcccatctctttcagaattttccacagtttgatccacacagtcaaaagcttgagcatagtcaatgaagcatatattttactggaattctcctgctttttctatgatccagcagatgtttgcaatttgatctctggttcctctttcttttctaaatacagcttgaacatctggaagttcatggttcatgtattgttgaagcctggcttggagaattttgagcattacattgatagcatgtgctgctgctgctgctgctactaagttgctttagtcatgtcttgctggggtccagccctggtggatccaggatgattcgaaggggagacggataggcgaggaaaacttatgtatttagagatataagattagattaggaaaaatagtatagtaggaaatttaggtggagaaaaagatgctgaataacttggtttatggggaaaatcaataaaacctcgagacaagaggtttgcaccatctatgttaggccaccggcgcccacttgaatatcgaagggtgccccgccttaggctcccttttgcgggggacttagcagctagggcgagtaagtagacctggtgagcctccccgctccagatgggaattcagctgaaaaaggggagaagagaatgacatagggaagcccagcatcggtgcaagactccaaaaatcttatttttcaaaatcagcttatataccccaagttgtacataaagaaataatggaatatgcagagttatgcaggggcagcagtcctgaccctcattgagacaaacaaggctttctttttgcataccctcccgtatacaaaaggtctcaggtggtttacattatcttctggccaaaaggcctgttaacatttttatggctctcttcctggataattgtctatcaaccagaaaactccttttccctagaagtgttttttctttactctgcatcaccctcaaagtactaaataaagttacattcctgtagaacaaaggtgcagtgggttataacaaagaaagtacttaactcaaagatctaatgttgctaataccaggtctactacctgtttttctatataccaactatctctacaaataaaagatatgaaaatttggcagcaagtattggctcaacaaatgaaacctttaatcagtcctattgtgatgattttgactcctcgaaagtccctacattcctaggatgttttaagcttcctgtgcctcccgcggtcaggaggcctcaaacaatcacatgtgcagctgtacgagtccagcaggcaggctagaaagccatcagaggggtttttggattgaaacactcatattatgcccaggagatttattatctaaaagctctaaattaatttttttttccagaaaaaggttgaggggggacagctccctgttaatgtcagacgagtaggtggaaagcataacacagtaaagcaggcagactctggttttggggggtggatgctcaggaaattaacccctgaagcctgatcacgtccttgcattttgtcaggcttccttcctcatgaccttgtcatgggtgggatttctcacgctggctcccggcagtgtctgactctgtgtgaccccagagatggcagcccaccaggctcccctgtccctgggactctctagtcaagaacaccggagttggttgccatttccttctccagtgcatgaaaatgaaaagtgaaagtaaagttgctcagttgtgtccaaccttcgtgaccccatggactgcagcccacaaggctcctccgtccatgggattttccagcaagagtactggagtgggttgctgccgggagccagcgtggagaatcccacccatggcaaaggtcatgaggaagaggcctgacagggcaaaggtgagatcaggcctcaggtgaccctccctggactttctcgagcatttaccccaaaaccagagtctgtctgctttattgtattatgcctgtcaccaactcttccgacattatcagggggctatcccccgtcacctttctctggaaaaagttaacttagagctccagttaataagtctcctgggcataacaagagtgtttcagtccaaaaactcctctgatggctctctagcctgcctgacaagtttatccagactctcagttcacccttcgattaccctggatccaaccagggctggaccccggcaggttgccatttccttctccagatagcgtgtgagatgagtgcaattgtgtggtagcttgaacattctttcgcattgcctttctttgtgattggatgaaaactgaccctttccagtctgtgaccactgctgggttttccaaatctgctggcatattgagtgcaacactttcacagcatcatcttttaggatttgaaatagctttaagggttgttaaaatttacccatagtgcctttggttgggagtgagagatgttgtgatattaaaggaaatcttttactacatttccaattatcttctaaaattttgggttgtcttcagtttctttatagcacagttcagagtgtgggtttaaaaaactatccatttcatcatcgttcttttaattttatttggatcttcacattttggggcacaaagttgtagatagtactccttttaacccctgtatttaaaaaaaaagtcctatttggatatggtgttatgtcctttttcccctttctaagaaaaaagttaaggatttattttttttgctttagttaatttgttcttaacctttccattgtaaaatggaatcctgctgaagaaaactatagaaagaaatgtatatattagtgagctattataagagaaacatggttgtagtgatcacccaggtcaagaagggggtctttgccaacctctgcagaagcctgtccatgtgttttaagcatccttttctctcccaaattagccacttttctgacttattctgaagagtaataagttatttaattttcacccacgtattcctgtccaggcacaacagtttggtgttgcctatttttttaaaaacctgtctttgcctttaagtctttcttagcctgtagttcctccttccaatattttcttttctgtacaaatgatcttctgaagaatctgggctgtttgacccatagagttctcatggtccaagtaaacattctgttctgtattttcttcaggttggcaggtaccaccagaacttgactggatttaggcttaatttcttaggcaagattgtaggtgctatcgggttctttcatcagggggcaggtaacacctctctgtgactttaactttggcagcactgatgtggaaagcctaatgtgttcactgattatttcatttgttattgaatgttttccttatgtaacccattgagaagtgaattttatttcaatttctggttatctaacaagtattttctgacattagaaaattctagatttgtttcatggtcaggatatgtgggctctacatttctgcaatgtattaagattacctttgtctctccttcttgggttttagcagacaagcatttcattttcaggcttcccttgtggctcaactggtaaagaatccaccagtaatgcgggagacctgagttcgacccctgggttgggaagatcccctggggagggaaaaggctacccactctagtattctggcctggagactcccacggactgtataacccatggggtcgcagagtcagacacgactgagcgactttcactccttccttatgcaaatttccaactgttctactggcatttgtaaacaacttttacttttcttttgctagtgatttaaacattttatattgaaatagtaaatcagattatttagtgtattcttcaaatggtctaggaaaggttctagtttctttttcaacaatgtgattaagagactgtgattctgcacatgactgagaacggggctgacgtaggtctggttcatggccacgtcttgtgtgccatccattcatgtccagcacacagaccaagaaaggcttatacgttttcaatgaaaaaaaacgataagtatattttgtggcacatgaacatttatttaaaatttaattttcagtgcctgtaaatagagctttactgaagtatagccatgctcattatttatagcaaaattgagtaagttaggaaagagactcatccacgaaacataagatcatacccgtgtggccctttgcagagtccgtctgctgacccgtagcagggagatgctccctttctccttatgctcctcattgacctttggcctggtgtccataaccaataatttgttataggactatgtaaaaaatccccaaatataactgcatgaactcagccttgcttgtgaccattaatttttgaccaccttgcagtcgatttcccttgcagtatatttccgtcttgtgtgtgtaaccgttgaaagctttaaaaggatgagcccatttgatattggtgctatgctacttgacgttgcttttcctcaatttcattcagtcagtcttagccattattaatattaaattgtaatgtaaggtggtaattttatattgtgcagtctgttaagtttgtgttttctgtagagtttcttattttccatgaaatcaaattgcaatttaaattaaataaacaaattgattgttaaaatcattctgaaagcaaatcctctgaggttttgggaacatgattttaattttattaaagattcactgttaagagttgactttccttatggataaagtcatgttcattgatttaaggtattttaaaacagaattttggcaaactaagggtttttgaaaaaaagtctaatcttgtaataattttttataggtagaagaatttggctgtgttaaaacaagacagcaggcccaaaatggagtcatttatgctaagccccatgtaaccaaactgagacaacatttagttttggctctcccagaaatgaaatcttaaactagtcagtcaagaatcacctactaagcactagacccttgctgtcccctaaagaagaatgtatatgtgtactcagttatgcccagctcttttgcgacccagtgggctgtagtgtgccaggcctctctgaccatgggatattccaggcaagaatactggaatgggttcccatttccttcttcaagggatccaggtatcttccaggggttgaacccacgtctcttccatctgcggcatcggctggcagattctttaccactactgacccgcctgggagtcccgagttgggatgatcttgccataaccagtcttcttctttgcctgatgaacctctttgttcctgctttcttctgcctataaaaatctctcatttttgtacacttccttggcattcctttctgtctgctaaatgggatggtgcccaactcatatttgttggataaaaccagtaagatctttaaaatttactcagttgaattttgctttttcatagctgttataaccatgtaaatgggttactctgattcacaagagaggagtttgtatcactagaatttctaacgtttttgtaacatagtttgctgggtaatcaggaagccatgacggacctttccttaagggtttaggatcactgtgttttactttggtacatggctgtgtctttctctgtatctgtgtcctgttttacttaaatttctaatatttatgcctgacaaattatttcatgtaaaatattaccttctaatgtttttaactttctatagcagttacttatgctcagataccaaaaaagaaaagagcagaaggtgactaccagtgaaaattgcagtgaaaagtaagcaaaatgtgtttccattttcacgcttgctagtatcagtgcaccttgttacactttatataaaagttctatatttatatatatacatatgaatatccacttattgacacacaaaccaattccatcgataattgcgtgtaactgggaatgttaatgcacttaagccattgtgtgtcaaagcaaccctgagaaataagtagctaccactctgttcttttccctgaaacactggttttacatttatctggttttaaaagttgttcatggaaaatttgtttatttttcttgcgattaattcccgattttacactcactttttctagttttgtcaccagtaaatagttagcatcaatacttgctgttttactactaattcaagcgcttatcaacatataatacgcttttcattcatgttaagcagttaaatttttatttgcttcaacttttcctaagtatgtgtttactatatgctccttctgcttgtttatgctttttctattcttacttttcatacttacgaaaaaaatagaaacggtcagtgagtatagctcacctctgtatgtaaactgttggtctaaggccaggtaataacagtcatttcttgctgcttggccttcccctgtggctcagctggtaaagaatccgcctgcaatgcgggagacctgggttcgatccctgggttgggaagatcccctggagagggaaagtctacccactccagtattcttgctgctaaggaattttataatctgtaacagtcatttttgaaaagtttttctaagtagttatttgataaaaataattataaaatttgaaaaggagttgcccttttgataaactagctctgttttaagattctcctttaaaaacatcagttgtgatccgttgcattctaataagtgtttggggccaggagagaaaggaaggcagaaaagcgtgtcccggtcagccctgcgcttgtggatgttgttgtgtggagagtgtgtgaggtggtgagtgtgtgcagagtgtgtgaggtggtgagtgtgtgcagagcgtgtgtggtggtatggaggcaggctcggtcgctaccgcatgtcatgggaaccagcggggaggacctgagtggggtgggtgctgagcagacaggaagaaaagatggcaatgaaaaggaagtttagcccattggagagtgccttcttttggtaggtaaaaagcttaaatatcaataattttatatagttcagcttataccttcattatcaacttgtgttagtaagggaaaacatcactgctaaatatttaaaatgaagacaattactgaatagctgtagtatttataaggagaaggggtcagtgagactagaatggaaagagtttatggaggaagttgatgtgtcctctgatacccaccttgttaaacacccttttggatctagcttggctcccatttgtgtaaagcttttactcagcacccagatggcaggaaagttctccatgctgggagagggtgaagaacctgtgtattcatttgtcatcaagctttgttaatttcctagaacatgttcctgaatatcacatgttcttgttcttctgtccagaatgtgttcaaactaagcttcctggataaaagttcctagtagtttttttttaaaaacaaaaaaacaaaaaaaccttctccctgtcctttcaggacaagcaccagctctggtcaatgagcatttcctcactgattgccttaggtacgggtttcctgtgaagctctgagtaaagcttcctaaattactcctctgtgagctaacataaaccatggttggttgtttgtttttttttcagaagatgtttttgggtgagttccttttaaaagaatggattagtgaaatagtaaacaatgggctttggtaaaggactttttgtattgacctctttataataaccatgggttgttatttaaatcctaggttacttcctgtagtcttttctcaccagatgtacttaacgctcctgtggagtggggattttatttcaagtgtctttactttaagagacatgtgaggtgaaagttgtctataaaaatagcatgtgtcttacaaacagaagatactacactcagcatagtaggctgagtgataggatttaaagtaaggaaagagtagttgttcatggttgtatcagtgggtctcctgttgttgaacatttgggtgatttccagtattttgctttaattaaaaatattgtaacgatggaggtgggagggatgttcaggtgagaggggatgtgggtaaacctgtggctgatccctgttgctatttggtaaaaaccaacacagtactgtaaaacagttatccttcaattaaaacaagtaaattaaaaaagtattctaatgaataagcttgtacagatcctaaattccttacctgaaatccatagggagactagctgtttagaaattcacattttttttttgatttcacaattgttaatgtgatgtatgttccaaaattacagagcatttctacggaacactggtaaacaagttactgtttctgatggaaaatgtgtgattaccacagtgttggctaaataaagcctgtaaatagcttcatattaactcaggttaattttattgctggatgacgttatataagaattaggaatttggttttgatttttggagcttgtgggcatgtgcatatatgtatgtgttctaatgtatttgtgggaatgatttccactgtggattttctggatgaagagaacatgcatttctggttttattcagcattgccaagctccccttgctggcactgtacctgtctctgctctcaccagcagtgtgtagtggcagagctggtctttccctgcgttattgctagtctgtgttgtcagacttgaggatttttgccagtctgatgagtgaaaaatagaatcaaattgtagttttataaagaacatttttaaagacaaggaatggcctgttcgtgtggcttttagttcaggatttttgtatagattgacaacctttttagcagtgactttgaaggtgtctttaagtagcagccgggactcaagaccttgctccctctcctttcttgcttctctgcctctcttttgtcccagatatgacgatccaggcgacatctgtgttcagtctgttagtccagtaaggagctaacatgcaccatgtagtcaattttgtgtttgtccttagttgatatggtaatagtttattttctatttcccaagcaagattggggctagtatattaatagtgaaaagaacatcctggaaagtgcagaattccatgttaaatgttaggatacgctgtttctctagcccagggaactttggaattgtggtgcaagcttctctctgcctttgggctcccgtgctgcctgtcgcttctcagtatgctcctatccatgacgggcttctttcagtcactcagctctcactttaagtatcatttcttcagatgcctgaagaccccgtctaaaatagcctcattgtctttctgtcccatccatttgttttattttcatcagagccatcagtgccccctggtgttttcatgtttgcttactgtcgggcttgtgctactagcatttaggtcccatatgatcaggacctgtgtcctggggccaggaatactgccaggtatgggctgcagtttttgtcatttttcctggagtgtcgtctttgatcctttgcctttctgctccctgctgcctccagatcacccttccccgcagccttccctttgctggctcccaatctcctattcatccctcagtatttaggagggaaggcggtacatgtactggagaaggcgatggcaccccactccagtcctcttgcctggaaaatcgtggacggaggagcctggtgggctgcagtccatggggtcactgcgagttggacacgactcagtgacttcactttcgcttttcactttcatgcgttggagaaggacatggcaacccactccagtgttcttgcctggagaatcccagggacggcgggggctgccatctatggggtcacccagagtcagacatgactgaagggacttagcagcagcagcagcgatatgtacaattgtatttcatttggaaagtataataagtactttggtcctcttttgaaacatttccaaaacatctatatcttgatttaaattatgactttgaagcgaagtttgcgtatttgacacttgatttttttggtgggggagtgaggagtggtgggggagctctaagggaagtcagtttcacccactagattgcttcctttgctttgagaagattacttccttgttgtctctctgattattctacctccaccccccacccctcccctccacccccattaagagcataggtccttgtgttaatcatttggaaggattcctgttccatgttttccacttttagttattgagtaatagttttagtattgaataatagttttcctgttacagacatcctaagaggggaaaagttacataaaaccacagatccatgacatttagaaataaagctgcccgtaccattgctcaggtgttgcagatgttggagacggcatcgcacaaaccatatgtattagaaaataaaagggatggaggcaggaggttaaggaatcaggaaagcctcatttctcaatttcttgctattgcaagtttaaattggacgttgtgcctcattttaatatgcagttatttggggtgtttatatgttttatgttttgatcactgttcagtatttaaactccttcaaatgtgcaaagattaaatgtttaataaaaattgcttgttgttttcaacatctgtgtgcagagaacaatggcccactggagtgcaaaaagcttgtaaagttttcaaatgtattgagaatgacagaaagttcagtgaagagtttgcttccctcattacagaactacttctgtggctgcgattacactaagagcatctttaattgctttaaaatctgaatgcatgataagaatggattaatttgatttttctgttactacaagtagcagatggtttatgtcttaggaatgctcatgttgtaaaatgagatccccagctcatccgtgattggtcactgttaatgaagcatgctgtgctgattattgatttagaaaatggggatgacatgagcattgtgtgtgttgctgtaataaattaaagaggagtattttaatagccagcagacatacaccttaaataacatgaaatatttgattttctattcaggtggtctctgccctgtcaaactaattttattgtttattaaaaagatatacttttatagtttcagctaacaagcagatggtcgtctttccttatttctgttttgtatcgctgtgtgaccgatcagacgcatgatacgaacccaaattagcttgttgtctgcaaagcggtggtgcagccaggggaggaagtcttctgcagtgtgtgtgtgtgtgtgtgtgtgtgagtgcctgcttgtgcacacccacacgtctctactgctgccttagtattcaattcttacttgcttttgaaaataaagcactctattgaaagttctttttgataattttaatttgtcttgaattaatttttaaaggacagatgcaggaggaatataatgggaacgtcagttactggttttagatggttttctgcgcatgtggttgtgaatttacactcgtaccttgctgcaagcacactgcaagagtcagagtgatggcggtttacgggtgttttatttaaagcgctatgtgtacggtgtcaggtgacgctcacagacatggaagcgcgcgctctcgatggccgcacaccgtttagggaagcctagcaggtggctcgccttgttactccacttactgtctcttggtctgtttccaggagattgggtgctctgtttttttatttgaagtactaaatgcattacttatattggaataagaattttgagttatttcatgacagtttctcttttatggcagtcttacctgtggccatgatgtcagggttacagactaaagtgctgcttgccttgactgtgggtaagactgaagaagaagatacttgctggtacactcttttagctttgtgtacgtacacttacatttttaattttcaatatttggtgaattctattttatttttatagatggatttcggttcacataagcatggccctttttagcagtacagtgctacttccgagtaagaaaatgaaagtataggtgttaggattgcaggcttaaagtaacctgagactacagatagaggcagtgagataaggggaaagagcatgctgaaatgacccactttaaccctgagttttagcgatttaaagcacattcatcgtagtaaaaaaatttaatgtttagtattaatcacataaaaagagagagactcagtgatttaagacacttgatttgatagtatgtcattattacatttaaaaaatcagtctacataatatttctgaggttgacgtccttgactttatattatttcacaagatgtttgggaaaaacctgtagaggttgggaataaaattaaatggattaatttatgttttatgtgacagtctggtttcaaaagaatattagaaaagtattcattatcaaaacattatatgggagaggaaagtccaacctgttgcatatttgttgaatagttacagtgtgattaataagtattttaagctttttctcctagtcagttaacatatgtgtttttgttcatttgtttatcaagggacaaaaaccactaaaattaataagaactagtttttagataactttacttttaaatatgttatgactagtagtgaacttcactgaatgggaaaatgaagagatacctggtttgttttgatcaaacggtaccaactagatatggaagagaaatttccatttgatacgtgttttaaaaataacacattcttggaaatggttaaaattgataacaaaagttactcaaattaatgctcttggaaataattttcagtagaataattgaaaagatttgaaaattcccatcagatttacctaagaatttttacttcaaagggccaagaaaattattttttttaatgtatatcttatagtttctctaaggcacatatatcctctattctgtaaaccctaataagtggatggctttattatttttcagtgtaaattagttttataatttagctttcatcataaagtgactttttttgctacagggtagaacaaattagtatcagcatcctgtactgtttggcctgccatgtttatgtctaatgcattttcttcccaaacagtagctacaagaagtctagaaagattgttattaaaagcaccttttcaagagaaacgtcaatttactgataatgatttttgtttacatttgtgtacatgtgctttctggatggaggatacaaaatgtttttttttgtttttatatttttccttttacaatacaaaacactgctttttgaggtaaaagcactataggtgagttgctgacaactttggaaacattttcagaaagcgaaatgcttgccatcaggtacactggtttcctgccacgtgaaattctaacattctgaattggaatatgtcctatctaggattctgcagttagatgttttaaaccttagccaactaattttttaaactctttcatgttttgaaagatttgcaggaagtagaggaaaattggacaagactgtaaacgtgtcagccacatccctcacatcttgttcttcagagcagagtaaggaaataggagacttgaagtgtcgtagacatctcattgcacatgttgcaataaacagctatagaattagatcatgaagtcagctaacctcatgtgcaatgatcaggtagttactatggtaacatttccatttgtggatttttgtagagttaaaatttgtaaccatcctgtcttaccaccattggcttttgatttttcatgtaaataaatcaccgtgctacctgcatcagccgcagcactgaactaccatccctatactctaggctagggaatcaaaactgggaaaatgaaagaaataagagcattttgctaaattacattttaagactgtcctgatgttgttggtaaaattttaagcatgtcttaggagaagtaagaggattgccagttactctctgagatgcttggatttttataagtatatgatatgaaattggttaggcgtggtaacagtaggaggtaaggagggctttaatttatcagctaagtgggtgctaagtaaccagaaccgaagtaatgacccttctgaggctaagaagattcctttcgagagcagtccccttttattttaaccttctcaactgtttgaaatttgttctgtgttcatatactcaaaagttgccctgcttatttcacttctgattataaaatcagactctaatatcttagattaacttggattaaaatagcctataatgttcccttgtatcaattactgtattccagtaaagatccctactgtttttgttttgttttgcttcccaaagccccctgctgctgttgattacacctaggtctgctactgattggaactgttaaaaggcagagacggtgtggctggttgctgaatcatttaattgtagggctaataagagatgttctgtctggggcctgaaagaaatagtagcatttgagtattatgtataaagaggccaagatatagtctttaataatttttgaaggtgtgaaatttatttacctagtgaatttatttacttgtagcataatagaggtttatcggcagcctggttagattcttaaaccctgtaagtgaaccctgagagaaagagagaaaggaggatagatgctagagaagaatttgtacagttatttttctctgacaattgaatgctgtttgtttttttaaagatgaaagaaatggagagctataccaaatggatagctgaaacaaatggatagcagttcatcagttgagacatttgataataaaatgataggaaattcagttaagtttgtaattgtggctgtgtttgtaaccgtgatgcacaatataaagtgaaggttatgtaaggtacaagcccctcaggagaagttaacatacaagttttggaatcaaaagataggatttgcatgatagccgagggcatttatgaggtgtccacagatcaagaacacccatcactttgtaccctcaaactgcttcaaagtttgaggtagttagtcctttgctttacttactgagggattatttgaaagagaataggtctgtgcaagtgtattacatggtactttattactatccctcttgctcataataagtaattgcttattcttttcaagacatttcaggtttttaggtgcagactaaatcaatggttttaagtaatttgtgtaaggagacatcttttgggaggtatgattgactagaacttgaaatggggaaaagcaaatgttcttttatcgaaatttatgatatttatcgaaacattttgatcagggaaattgcatgaagggtgctgtcagaagggacaccgcctgtcaggtagatgctgggttggagggactggttagaaagccctgcagctgacaggagaaaggaggtcggacttggcggtggcatctctttcctttcgttggtgactcattgaatcggtaaactatgaataggactgctgaaacctaattaatgaatcgtgaacatttatgtcatctcaagtaataatcgtaatcattgttgtgatctcaacatttgacacaatattttgttacaatagtcattcaacttctaaagtggggagaaaaaaaacccgaaagctcttggattggtctgctggggctgccatgacagggtatggcaccagctccaccaacaccatctccacaaagcaggtggagctgcctcccagttctggaggcgagaggtcagaggacaagctggttctagcggctcgggctccttccaaggcccctccccgggttgcggatggcgccttctccccatgcccctatcttcagggtcctccctcagcctggggctgcatttcctctttccagaagaactccagtcctgtgacaggggccacctgaccaccttgtccttcctgtgtctccagacaaggccacagcctgaggccctagggttaggatgcaaacctataagtgctgaagggtctgaatgcaacccatgacacctctgtttgaagctggtgcggtttacccaccagtggctaatgacacagatgactaatcaaaccagtgtggtcacagaggagagatgagcacggcgccgtagggcccgcagtcacctgtccctatgtagttggcatgtgacggagtgttcacctaggtatgttttattattttccagtttatattttcagtcattgtactggtttccatctgtggcagaaatggagatgaaaggctgagtttcaaaagtgcagtagaactaaactccttgtccctcctcttcccttgcttcaattcagttcagttcagttcagtctctcagtcgtgtccgattctctgcgaccccatgaatcgcagcacgccaggcctccctgtccatcaccaactcccggagttcacccagacttgcatccatcgagtccgtgatgccatccagccatctcatcctcggtcgtccccttctcctcctgcccccagtccctcccagcatcaaagtcttttccaatgagtcaactcttcgcatgaagtggccaaagtactggagtttcagcttcagcatcattccttcaaaagaacacccaggactggtttcctttagaatggactggttggatctccttgcagtccaagggactctcaagagtcttctccaacaccacagttcaaaagcatcaattcttcagtgctcagccttcttcacagtccaactcctcacatccatacatgaccactggaaaaaccatagccttgactagatggacctttgctggcaaagtaatgtctctgcttttgaatatgctgtctagattggtcataactttccttccaaggagtaagcatcttttaatctcatggctgcagtcaccatctgcagtgattttggagccccccaaaataaagtctgacactgtttccactgtttccccatctgtttcccatgaagtgatgggaccagatgccatgatcttagttttctgaatgttgagctttaagccaactttttcactctcctctttcactttcatcaagaggctttttagttcctcctcactttctgcttaggataatctcaattatcatccaccctcaccatccagacttcttaagttttaaaaaaacaagcattatttttgaaatattattgataataactggattataatgttgcaccaggtgggcatttatgtacaactttgaacaggtagtcatttatctagaagagagatcgtcaacgtatggtccctggaccagcagctcagccttagatattaaccaggaaatttgaggatagagtctagggatctttgtttaatgagaccttgggtgattctgctatacaccaacgtttgagggccactgggctgaatacaggagtaatacctaattttactactgtttttagtagttgttcccccccccccgttattttgtttatattatctgatactgagattttgattaggaataccactcaaaattattacattgtttttgtggggaaccatctctgttgttggtttattgtgtgtctttctagaaatgttttatgtttgcaaaagcaaattctgctctctttaaatatatgtgtgtgtgtgtgtgtgtgtgcttgtgtgtgtgtgcgtgcacgcacacacgtgtacatgtacatgtgttcctctctctctctccttctacaggtattaacattggaccttgctatttttacttataacttgaaagtctttctatatcaatatatctgtctttgtcctcctcttttttaatagctaagtagtaataccactgcacgcctttacagcaacttacttaccaggtccccttttgatggacatttatgtttcaccattttgctattttaaaaattccttgagaaatattattgtgtatttaagttacggctatatagtttcccacatattgaagtatattcacaggataatttcctaagaatgtaatctcagggtcaaagagtatctatgtgtatatatatacactcataattttgatagctatttccaaattgccctccatggtagttgtaccagtgctgtaccccctttatcagacagaagttattacttcaaaaatgtgttttcttaaggtgcagcagtgttacataacagttatgtttttgaaggaaacaaatctatgttatgctgagaaaatacccccaaaactgaaagatagcttttaacaaacagtatataagactactacttcagagttttatagataagttataatatgttttagaaacgtcttattgcatactgaagagaggattgatgattgtctcctctaacctgaagtaaatctacaggtagtgattcattaaacgtgatttttatatctagaaaaacatatttttgaaatagttccagagtacttggacaatttctaaatgtgggaattatttgagatattacatttgtagttgcttaaaattgtatgacttttttttggtatctatcatagttgttaattaaaactctttttaggttttttcatttactcagtatcattggtttatattgtgtgaatcgtttcaaaatctaaaatgaagcagtgagtgagaaagagcactgggtttttggtggtggttttaaaaccattctatactacctccctccccccgccccgcctttaacactctcttaacttaaaactactaaacagatttttattttaatcactggaacaaaaaatgttctcttgggctgataccagtactttctgtgccaagttacagaccggaatctatttttacaggccaagatagaaacctctgaaaaccagagtttgtaatggagacactgacaggcccttagctatcgcagcacacacggctctgctggaatccgaaggcacgaggcacggggctccacaggcaggggagcacggggcttcagcagctgctctgtcagatgcctttctgctgcggtgtaggaagagtctgtgcaagcgcagccaagcccggggccgtgagagcccggcgtgtgggccagttcctgccctctggatgcttgtgcccaggcgcgcagacactggggaagtagtgatgcacactcgtctggagacggccttgtgcgcgaatatggtcagggagaaacacgtgaacttcttggtctctaggtttaattcacggctcagccctgaaagtcttgcatgtttttgcacgtagggttactacacatgtttctgggtattattgcaaagctggaagatcagatcaattacatctttattataataccatccctgaagaaagcttaaatgttatgttgttacacaagccaggcaagtttgatactgagtagttgacttggaaacttactgtttatgtcttctttgagggattctttttaggttaaaaaaaataggcttttctgaaaaccacgtttgattgctcaactttatttgattaagcaaaaatcattaaaacaactaccatttttaaaattactgtgcttttttcagttatgttttattttaaatgagactggttcttctactattagttaatgattgccatcagttaacacagaatgaatggtcctacagtgtaataactactttacagggagaactcagaacgtgtcagacgctgggatgcggtgaaaagggcttgagccctacaggtaatttgaatgttcatgaagggctgtgttttcgcgcttgtaacaccagcattatctagtctcttctttccctttatcttgttaaacgtgggagagaagtggaggtgccatgtcagatgcgccatctcagaagcatcctgaagtgttagggaaaaccagtgtctggtgggaagataatgaagtgacactttgctgctacaggttcgccagtactgccagaaggaaggggtaagggggagctgttaatttgaatctgaatcagattttctgttctagttaaattttccttagctattgacctatatatctgtatctgtatatccgtatacatgtattaaggtttaggtaggatacgtttctgtcctaagagatacgtcttatgcatcaagttggctttccattaatgaagagaatgtggacatttctgagtactttcttcacctaaagtgttagaaacaatgctttagcacatcctgaaaaatggaaaatgtctaaagtaagctttgtagttctgtgcactggtactaattctagaataaggagttttcatttccatcttccactttcttgctccgtttctttaggaacgagagtctgtatgctaacctctgcttcccctcgccactgctgtggaaaacttccccaagggcttagggaaaatacagtgttgatcttggctgtacaggcagaagttagtgtcatattttacaagttccattttgtaagggcacttcacgaagaagtgaggtaaaggagcggtgtgcctgtgcgtgggtgcttgtgtacgtgtgtgtgtgtgatgatggcggaaagacagaaacagacattcctgagttcctaggtttacagattaatctgctttataaattattctggaaacaaaagtacaataatgtaagcataatactgtatgaggccaaaatccagaagcatttctagagctgactaaaatatttttgttatttacattcgtagctgagggggctgataaccattaagggcctgctggcatgttagacagtacacagcttctcggccatactgacactctcaataaatttactcaatccacacctgccattagcagtttctggctcaagtctttctcaggaggggcagtagttttcagcagtgaaggcctctgtcgtactgacactgttaataagtctgtccgatgcacatctgccattagcagtctctgactaaactctctcttaggaggggcagtagttttcatcagtgaagggagaggcttagttgtgcgttgcctctatgcctcgtgaagctgaggtggctgaggcggtgtcaggattttcctttcccagcccatccgtgtgttttttccccttttttagttttcttacttgaacttgatacgccagacactgggctaggagctcctgaccttcaacagttattattgactcaaaaacagctcaaggctttggatttaatttatgatatttatacttttaaatttgctttcaagctttggtatttttgctttctttacatattgaccttaataggtcagataagctagtgctgtgtcttaaatatgttatcttttaattgtaaggaacagatttaggtattattggaatgtagaaaataaatttacttcagaaaagaatttagtatgtttttgaacttaggtaaataattggaggagacttttgttcacttagtttccaagaaaatataggtattccaggtaagagatttggctgatggatgaaattttatgccagatattgaaatatgcaagaataccttggggaactagagaatggaaggctgtgagaggaagcgttaattcccaagcttattccttttaacctactgtacttcttttctcgttcctttaatataaattgccatcatttcctctagagagagagaagtgagctctggtgtcttcgctgttgctgatgagcttagtcacagccatgaacccgcagccgccgcggggctgcatctgggggctgagactgcgccttcgcagcttgctccttcctgtcgaggccgcgctctcggcttggggtccgctgagcctgcccggcctcagatcagctgccggctcccgcgtgagctccgcgtccttccccggcctttgtctccgcagcttccgtacggtttcctcgtagcctgacacgctgcttgacacgtgagctgtgtttaggccgcgggagtgtgaattctctggagccagagctcttcctgcgtttcccaggagctggtcatcttgggccggcctctgggctccgaggatgcggccggcgctggctccgctgagcgtctcacctttgccgccggcttcctccaggcctgcctccggcctcccgcgcttcctccagcggcgcgctgggcaagcgggcgtggagtctgcgatcctgcccagggggcgggtgggcccagagggacactcgcgggctttctgcgcggaactcccagcgccggcctgtgtcctggcctgttcgcatcgcccagcggctgagtgacggtggcgccgtcgcggagcgcctgacgcctccgcgtgctggccgcgaacatgccccgtgttctgagtccttcggccttgtttagtcctcacaaaacctgtgacgtgtacttcccacttttgcactgagggcaccaaggcagagagttcagccgaggtgcctgaggtccgataatgagtgaaggcgtttcctccactcgagcccagaatgtggcttggccctggagctcgcagtggcagagctgaaggctcccgctgcccgggggctacggcgcgggctgctgctgccttgagggctctcctttcattctcctagaagaaagaacccttctgttttgcttactggtttttttttttttttttttttttttttaatctgaagtagaaatacgggattgactttaaaatgatctaatttctgaatttattcaattcaaaagtttaaaattgaatgaaaaggagttaggaaacatttcacagagaattgaacatttgagatgaactttgagaagtgattagtggtgtctggtctgatgaatatttattcattaatttgacaatatttactgtctgttctttgttaggtcatgagaatagaggagtgaaaaagaaaaagaaaggtttcagagagaggggaatggattgggataggtttccctgaccaaggctagtagcccaaacaaatagagaggaaggaacactagatatctttagagaatgaaaagatatgaagacgattagaggtagatatggataggtcaggaaaggtatggagaagttgttaggtctattaatatttcagtagacattatgcagtcacagacattactgtattgatgtaatatgaaatataaagtaggttatgggtccaaagaataggattttattaatagctctgcttcctaattgtatgaatttgaacaagtgatcttatgttttcataagcaaatatttcttataggatatatcctcatgttatagttttttaaagcatacacagggctctaaactgaaaaatctttcctcagacatagcaagcttatatttatatatattttcaaaataaggagtcatgctgtatatattctgctacttgctgattttagtatcctgtatatattttcttacctgtgaatttatacttttaatgcttatgtgttattccatttctgggttaccaaatttataaaaccaattctttatcgatggatagttgggatgtctatagcttttggctattacagtcaacatctttctgcatggatttggctagagggcatgtcagtaggataaattcgtcacagtagcattgctgaaccaaagggcatacacatttataattttgatacttgttgccaagattgcttttcaaaaattcgtgcttctataatcaagttaatcaaaatcaaaatgcgtatttctccacatccttatcaacactaggtattatccaccttttttttatttggcaaatttgatgagaattacgtctaattttttagctgacatttctttaattgtgagtgaggtgcacattattctatgttgcatgcacacacattcacacacagtaacagttcattttgctgggaactgctgagtgctctctgttgctcgttcatttaactcttccagttttatttttcttatacactttttaaaaagaggacagttacccttcttcctcagtaaatggttgagatgatcaagtaagttagtgtttgtcaaccgctttttttcattattgcttccctaaaaaaacttttaaacagtgttcccctaatcctccccctttcccagtgatgttttaataccacaaatgtacacggatacgctttgtatctgtttatcttccgtggcctcttggtgggccataagccattgtaatgtctaagatttctctccagctccaccccaataggcagttttcatcccctcaaggacagtatcacgcctgctgagatcatatggtacatgtaaagtttttgtaaagtgcaaagtgctatttaaatataaagctttattgttaatagtttgcatctcatgtgatagaatattccatgtctgttttgcagctgcctttttctcattgcagatttcccttttgtggctctaggcattgattgttgttctgttcaattcgctgcctttgggacagtcttgattgtgctgacctctcctcagctctccctgcctctcattaagatgttactctcctttgagagcctgtcctggataaggtcactttctccaggaagttctgtttagtcccttgtaattatgccttggcttcatagagttagagctcttttaatacattttttctgctgtgacattctctcttttattataggtctgtctatctcctcctgatagattgttagtgtcagaatagcagtgatgttgcctcttttcatcctttattcccatatgttcctttcacggtgccattgtacatggtgggaagacaggagggacgtcttgcagtggatttcgaaagacatttgaattcatgtcccagccactcagtgtgtaaccttgggctgagatctttaacctgcaagcctcagtatccacctcgtatccacccaaaatagggctaataacgccatctttttgataagattgctgaaaagattgaatggcataataacataaagcacagtgcctgccatttagttaagctttccattaaatattcagtttagttcagttgctcagttgtgtccgactctttgcgaccccatgaatcgcagcacgccaggccttcctgtccatcaccaactcccggagttcactcagactcacgtccatcaagtcagtgatgccatccagccatctcatcctctgtcgtccccttctcctcctgcccccaatccctcccagcatcagagtcttttccaaagagtcaactcttctcatgaggtggccaaagtactttagtttcagcttcagcatcattccttccaaagaaatcccagggctgatctccttcagaatggactggttggatctccttgcagttcaagggactctcaagagtcttctccagcaccacagttaaaagcatcagttctttggcattcagccttcttcacagtccaactctcacatccatacatgaccactggaaaaaccatagccttgactagatggaccttagtctgcaaagtactgtctctgcttttgaatacgctatctaggttggtcgtaacttttcttccaaggagtcagcgtcttttaatttcatggctgcagttaccatctacagtgatttttggagcccccaaaaataaagtctgacactgtttccactgtttccccatctatttcccatgaagtgatgggaccggatgccatgatcttcgttttctgaatggtgagctttaagcccactttttcactctccactttcactttcatcaggaggctttttagttcctcttcactttctgccataagggtggtgtcatctgcatatctgaggtgattgatatttctcccagcaatcttgattccagcttgtgtttcttccagtccagcgtttctcatgatgtactctgcatagaagttaaataagcagggtgacgatatacagccttgacgtactccttttcctatttggaaccagtctgttgttccatgtccagttctaactgttacttcctgacctgcatatagatttctcaagaggcaggtcaggtggtctggtaatctgcaaatatttcttagcacagagaaagacattgaacgaagtattttcataatcatttctgtttctttcttatttgggaacataatctgttgttcattatacacagagaaaatgtggttttctttaaatcatttctttttttaaagaatatgtcctgcagtgtaattcagcatatgggtatcatttaaagtatacctgaataataatatattatgcattcttcttttgtctttcagtatagtgttagaattattaaatagccacgatgaaaaaaaagtcctataaatcactgagcaaaagacaacccagttgagaactgggcaaaagataggacagcactctgatggagagacctgaatggccagtagagggatgtgcatgatcaattccatttgacaagctgactgggccacggggtgcccaagtgtttgctcagactttattttgggtgtttttgatgagggtattttggatgaaattaatatttaaatagacagaaagcagattgccctctctaatgtaggtgggcctcatccaatcagtcgaaggcctggatagaacataaagctgacctttctaatgagcaagaaggattccatagtgcaatgatttggacttcatatacaacatcccttcctgccttcaaactgcaacattatctccacctgtctaagaggctagcccattgactcttcctgaatcattctcttgctttcccattttgatcattgaactttctagtttccattaatcatgagagccagtttctttataataaatctctctctctgtctctctctctctatatatatatatatatgtatgtgtgtttgtgtgtgtgtgtgtatgtaaaagtgatattcagtggcactcatttatttacttaagattttggccatgctgcacagcttatgggatcttagtactccaactagggattgaacccaggcccttgcctgtaaactgctggactgccagggaattccacatctatgtatgtcctcatttgcagggatgaggtgggggaaaggtgggagagagagagatggggaagaggaaggaagaagggaagagcagggaaagaatattgcctattttttctgtgtctctagagtaccttcactaatacagcagatggaaaatctttctatcagatagtcaaggtgatgctaattaaaaccacagtgcgataccacttcatactgttcagactgacaaaaaaaaaaggaaaggcttgtgatactaatacagaatttcccatatcaaatgtaatttggttcagtgactttggatcagagtttgacagtattttattagatgagctaaggatttgatccagcaatttcacttataaaatgtcagtttacaagttgtaaagtctactgaaatgaataggtttgtcatcaaaatataattacattaaatgttgaaatttattttaaaatttagttttttgttaacatgcttcccaggttggtgctggtggtaaagaatctacccaccaatgcaggaaattcaggagatgcaagtttgacccctgggttcggaagatcccaggaaatggcaactccagtatttttgcctggaaaatcccatagaccgaggagcctggcgggttcctctgtccatggggttcatggggttgcagagtcagacacaaatgagcacaagcatgaatttatgaacaacatgcttctaatgcaggttggttcacgattgacttttgtatttgattgtgtgtgcagctgtagatacatgtatgtgccctgccatatggattcagaattgctattttgtgcagacttgtatagagcagttaataaaattattagtgaaatgaagtgttttgaagaaatatatcaagaatttcagtcaccaagtacaatatgagattctagtagtaatatttttgtactcttctttttttgttgctaagcattttctctcagtaaataactggaaaaattctgtaaggtataatgttggtgtttcaaaggatattgttgctttagttgctaagttgtgcccaactagcccaccaggctcctctatccatgggatttcccagaacactggagtgggttgccactttgttctccagggaatcttcccaacccagggatcgaacctgtgtctcctgcattgtcaggcagattctttaccattaagccaccagagaagctcctccaagggatgtatgtgctacatataaatcagttcagttcagtcgctcagtcatgtcccactctctgcaactccatgaaccacagcactccaggccaaacatcaccaactcccggagtgtgcccaaacccatgtccatcgagttggtgatgccatccaaccatctcatcctctgttatcaccttctcctgccctcagtctttcccagcatcagggtgttttccaatgagtcagctctttgcagcaggtggccaaagtattgaagtttcagcttcagcatcagtccttccaatgaacacccaggactgagctcctttaggatggactggttggatctccttgcagtccaaggcactctcaagagtcttctccaacaccacagttcaaaagcatcaattcttacacgctcagctttctttatagtccaactctcacatccataggtgaccactggaaaaaccatagccttgactagacggacctttgttgacaaagtaatgtctctgcttttgaacatgctgtccaggatagtcataactttccttccaaggagtaagcatcgtttaatttcatggctgcagtcaccatctgcagtgattttggagcccaagaaaataaagtctgtcactgtttccactgtttccccattgatttgccatggactgatgggactagatgccgtgatcttcgttttctgaatgttaagtttaagccaactttttcgctctcctctttcactctcatcaagaggctttttagctcctcttcagtttctgccataagggtggtgtcatctgcatttctgaggttattgatatttctcccggcaatctggattccagcttgtgcttcttccagcccagcgtttctcatgatgtcctctgcatataagttaaataagcagggtgacagtatacagccttgacgtattccttttcctatttgggaccagtctgttgttacatattatacatataaataatccatattataaagcaaagtattagtttctgaaatatgaggaaggcagtagactgcacaggtatattttataattaaactatgtaagtttactgatttgaccacttagattcaatttaccacatcaaagtaagtagtggctttacttaagtagttagtaaaaacttagaaatttacactatttgagcagaattttcctactgtattaaaaataattggccatcttgatcttttacttgattttgttggatttaaattcctagaaattttaaatatatatttataattgtaaaagttacagcatagcataaaaacttttctttgctaaggaaaactttgttaaattgtacttacataaaagtcagtatatttggggttgtggagggaaaggatcatttggttttgaaagcctctttttataggaaaaaaattattctgtaataataacaatgtgcttcaatcctgtttattcccgttagaaattaggacactatttccaggccttcaacaattttcagagccgtcagatatcttacttatctccatttgtacaaatgccattgtaatttcaaatgattgtgtctaatttagtgtacttttaaacattttattgtggtattcagtgagattttggagatagcctactatcgtcttctgcctaaagcgtatacacagaaaaaagaggtgtctgtttctgctggtgagtttctctgatgaagggacagagtctgcgcagccctctgtggtccctgtgtacccatattactgttgtgtagtcctgcggttttgttaattatacccttttgtgagtcctttcaggcctttgtttgttctgcatggagttgatggaattgtgttgttttctagtatgcattgaaagtagagtgagagtgttagttgctcagtcgtgtccgactctttgtgaccccgtggactgccgcccgccaggctagtctgtccatggaattctccaggcaagaatagtggagagagttgccatgcccttctccaggggatcttcccgactcaaggatcacacccgggtctcccacactgcgggcaggttctttcctgtctgagccaccagagggccctagtacgcattagcgtctcaaaaaggtttcagtggtggcggcagacaccagcatattacgtgagtgctgtatcttgtcttctgtcttagtaattagccctctcttcttttttttttaatatgtttgtttatttaattcatttgactgtacccgctcttagtcgcggcatgcgaatgcttagttgcagcatgtggaatctagttccctgaccagggattgaacccgggcactctcaactgggagtgcagagttttagccatattccaccagggaattctcagacctttcttctttatccatctttcattttgtcggtgcttaaaactttccctctcatgaaagtgaaacctaaacatttaaattctgattttgagagtcttatgtttacattttaagctatgcatatgtatcagtgtttttacaaggacatctgaatggttttggtattagaacacgtattgaaatcatttgtacacataccttttgggtaaagatggaacagttacatcaacatgtggatatctaagatcctgcgaggaaccatcaagtttaatttttctgctatttagtagctgatgatttctgttaagtttgttcatttgtttattattgtatttctttatagccccttttcttaggacaattggaaatcaagtgctggtggggctagggggtgtccatttgtgtggtatattttggtctttcccgttaccaatcagagagcagccctggaaaaatgcttttttgccttagagttagttcttttggaatctcaccttttgagagttttggtctctttgaattctggaactcctccagtgaacttaccgcatgttttctcgtaaatgttccacttatctactggtagagttgtcagataaaatatagggtgcacagtcaggtaaataaagaatacatttagtataggcacgatccaaatattattttgttgtttttctaaaattcaaatgggcatctgtatttttatcttacgttatttcaattaattaattaatgcttagtttgcagcttacttcctcagctttcctctcactgaactctgagccacttgaatgaaggggtgcagttacaccctgattcatctggacctggttttcctgtcactgtgatgtttactggctgaaagaatgagctctctaatcagctctgagtatttctaaagcagctttgctcagctgagtttgcccttttatgtgaatttgaattcattgaaaaaaaaaaatcctgtttcaaagaatagttgcagatctcaagcttaatggaaaaaattccatctctccttcccttcgtcatctttctctcccttcttttttcagctcttactataattagcagcattaacagcaaatgtttgctttagttaaattattcagaacatttattttacttgtcaaaggttagatcaggttgttgtttgaactggtaattaaatgcagtctaatacgctctcatgtttatatgcactataagctcggttcctcatcactttgtataattttatgatgttcaaggctgacatttcaaaaaggtttttgattttgtggaaaagaaaacattctgagtagtttgatatctgaggtgagaatgtccaaagttatggttgaaagtatcacatttcagggctgttgtaacatccagcatcacagcggtaatattccccaagtagtgtatagaattacgctcactgcttattcaatttgtgtttgacatgatgatcagtgctgaaggacttggcccctagtaggtgttcaatatgtatttgttaaatgagtgttttaggttatattaaacagtacggggcatagctcagttcttgtagctcagtataatttaagacagtatttgttcctgctctgaggctcttttaaataactccaatttgtgtgcttgtgtgtgggggcaagtctaacacagctaatctttgtatctgggaattaggctcaattatgccttggatttgtggactcgttgaataaatgatttttacaggtgtgtatatgtgagtactttggagtatagatggatagagcacatcctctatccttagaaagaatagaggatagtggagaacaactgttaaactgaggaagggttcacgttagtgtgagttatatacacagcgaatgggcatctgaggggcgctggggaaggtgacttccaagctgcagcttaaggacagatgcatgtgtgctaagcccttccagtcatgtctgactctttgccaccctttggaccatagcctgccaggctcctctgtccagggattctccaggctggaatactggagtgccttgctgtgccctcctccagggcaccctcccgacccagggatcaacccaggtctcttagtctccttcattggcaggctggttctctgccactagcaccaactgggaggcctaggttacagttgattaagcaaagaaggtgaggaacgaaccaccaggcagagaagccatttgttggaagttctgagggttgcggtttgtgggcgtagttaaaggaagagcgaacatggggaaggtgcaggccgagtcccgcgtcttttccggaagttgttcagtagcttccctggcccttagggaacagctcaggacataccgtgtggtctgtaaccctgccttacagaggccccgcctgcctcccgagctggttatcacccaagctgagcccgcagcctgggccccagcctggagcgcacgcggacgtctcctggaagccctcgcacagtgtgttcctctgccggcggccccctccttgcctcccagctacagtccgcaccacttttatttagttgaagtatcaatataacattaaaaagaggccagtcacgtggtatcttaaaaagtattttaatattattgtcagtaaactacaacaaagaaccttggttccactgcagtctttggtctattttcccacacgtgatcttgtttaagtctcacgttagtcatgagataggtcttacatgaaattaacagagaattgtctttcattacaaaatgccatgttttagctagaatttaaagctacttgggataattgaaatgaaagtaaagccatctttcagaataagagcagatacagagttgtgtgtataccaaaccttctttgtgtgtgtatgtatttttaataaaattgacttaagtgcttagccacaagatgtaatctatttgatttcaaatgtaaaccagatgttatcctaaaacactttcagattctacttttatcactgaaatgctagtcttgttttttttctttgtaattcatataaggaaactttaaaattccagaggttaacttttgtcagaaacttcattaaattgattaatcacatacctaggtttgtgacatattctcatcactggccgtacatggtactcttatctatgagattagcttgcatgttacataacaattagtaacatgtcactagtttttcagaaatttctcaaaatctaagcatttgtagttgaaatgcaaggagttaggccaattatcatccagtgtactagtgtgtttagcagctaacctgatttcagccctgaaaaagacaagggttatttttccagtacgtgaatgggcttgactcacagggcgtgggtcccaggttgggtcagatatgcagatttcttgcgtcattggtcttccctggcttcaggaagaaaggggagcatttctcatcaacgggtaaggttaaaggtaacagttggctactgaggtggtgagtgcagatggcagaggacagagtgtgtgtgtgtgtgtgtgtatgtacacatgtacgtatgtatgaaggagggccatacgagggtccgctggtctgcaaggaacttgggctctcttctcacatgctccgtttctgagcaggtcctgagcagcaccccaggctaagtgtgtgttcagctaccctgggttcggtctcaggatcctgccacctaaagggacaggcccttgcttctttaaggtgattcttcttagaagattttccgagggcttccccggcagtcgggcgattaagactctgcacatctaacgcagggagccaggggttcgacccctgggtggggcgtggccatgaaaagaggtctttccaatttctaatctatttaatgggctctgtcttctcaaatatgtgtttaaaaagtatttgtttattgcggggtctttgttgctgcacacaggctttctctagtcgccctgcaagggctgcttgttgtgctgacttctcctgctgcagagtgcaggctgcaggacgtgggggcttcagtgattgtggagcacgggctcggtcgctttggcacatggacccagttgcctcgtgcgtgggggtgcattctggaccagggatagaacccgtgtccctgcattgcaaggtggattcttaactactgaaccagcagggaagcctcagatgtctttagttcttatctctttcatgtattttgtgccaaatgtagctagaagttctgaaaaactgatttaaatgaataactaacttagactcagatttatctcattgtactttattggattctttcaaactgtcaccaggaatgccttactggggaaaaaaaaaaaaaggttaccttccaaaattgggagaaacagaaatgaataaaataggtaaagcctttgcattcatagacttataatggggggaatgcattgtaaacaaaacacaggtaagtttgtgctgtgtgaggtagtaatgtgtgttataagaaaagctgagtgctgggatgaagacggagggaggcctgagtgtggctcctggtgatacccaaggtgatgtttgagcagggcttggaaaggtgtggggagagccatctctgaggacggacacctgaggggcatgtttaggaaccaaggaaggtgcagaggcccagtgacaggaagtggcccagcccaggcgagagactgtaagggggcctcgagggccggaaggccagagcagcaggtgcaggggagcttccggagaaaagctcaacgtggtggcggggggcaagatcctggagtcctgggaagatagtttattttactctgactgagatgagaagccagtgctaagttctgagacagggactgagttagatcttgggacactcaggccactgtaggttagtggactgcagttggaaacagggagccctgctggaggagatgaaatagtctgtgtggggctggacctggaaccaagtgatggtggtccagatttcacattgaagaaccaacaagatttgccagtggcttaggcgtgctctaggaacagccatcatgatctgaatttgagcccatatcagtactaaggggcacagtgtcccagcagaggaaggggagatgtgcagagatctgaagcggtgctgagttggattcttgctcgaggaacagagagaagtcctgtgtggcagagcatcctgctggaggagagagtggggttaatggcttaggcgtgagtctggattcagggcctctttacaagagtttggattttatataagtatgttgtgaaacagtttacactggcaaaaatatcacattggatgttgtgtggtaatagattgtaggaggtaggtatgctaggatgtgaaatctggcgataacaggaaatctaagttgggttatacagtaaggattctgttactacctatgaggtagggtgaatctagcttgtgtacttcactgcagttaagagtatgcatctttgtaattgagaaaacttctggaagcccttggacaagttccgttcacattgaacagctcatcctaatcaatctggcacaggaagtgatcggcttagaccatttctctctgcctccccaacccccgccatctggtccctctctaggaccacgtggcccaaacacaatttgaatgttgttggaaagacaatcaacagcgttggcaacagcaaggaggaatggaagctctgagaccagttagggaagggcgttgtcagagtaaatgagggatgaagtctacaattaggagtggtcacactgcagagggaaaccagaaacgtgaacaaaaaacgtttgctctctactggagtctcccgtcacacaccttctctctttaagacaaatctgtactaatgctgttgagcaaaaggcagaacatagttcttcagactcttaactcttggcgtttattgcttcacattgtcttgctggtgccggtggtccgtcacgtgtcatgaagacattctgctgtgctgtgcttagtcactcactcatgtctgactctctgagaccccatggactgtcgcctgccaggctcctctgtccatggggattctccaggcaagaatagtagagtgggctgccatgccctcctccaggggatcttcccaacccagggatcaaaccaggtctcccgcactgcaggcggattctttaccgtctgaaccacagggaagcccatgaatagtgcagtaggtcgcctatcccttttccaggggatctttctgacccaggaattgaaccaaggtctcctgcattgcaggcagattctttaccagctgagctaccggggaagcccaaaaggtagaacatagttcttcatattccaattcctggcattactgcttaatattgtcctgctggcgcctgagatctgtcatatgatggaagtattgctgtggaggagcaggggaaaataacttcttgcctgggtccatagaagggaaggtgggtattcagattaggtctaggatttagaaaagtgagtggggaaggcctcatcagaagggaaaggggtgtgaataagcctagggagggagctgctctgtctggagaggatcaggcggggcttctgagctgctggccacctcagtgctgtgcccaggtctgcggtggcggggccggaggagcccagccctgggggacggggcgggtgccacacgccggcagcgcgccagcggccccagaggccccgagggccgcccgctcaggacttagggctgggctaaggcagaggttaacgacatctgcatccctgctgtgcgggctgtttgcttttttcactggatgttcatttattctcacatggaatttgggaagatacatatacctgtaactgtaaagggtctgtgagtgagggaaagtcgctcagttgtgtgtgactctgtgacccgctggactacacagtccttggaattctccaggccagaatactggagtaggtggctgttctcttctccatgggatcttcccaacctataaagggactattgcacttctaattctagattttgcaaagcttgtatgggagaaatgtaaactagaatgctttacattaaaagcattccttgttattgtgctttgaagataatggcatttttaagaaatttgagggtttgtgttaaccctgtgttgtcagctgatggttaacatattttagaaatacagtattttaaattaaggtatgtgcattttttagatgtactattactcacttaataaggtacagtcagtcagtcagtcaggcagttcagtcgctcaatcgtgtccaactctgtgaccccatgaatcgcagcacgccaggcctccctgtccatcaccagctcctggagttcactcagactcacgtccattgagtccgtgatgccatccagccatctcatcctccgtcgtccccttctcctcctgcccccaatccctcccagcatcagagtcttttccagtgagtcaactcttctcatgaggtggccaaagttctggagtttcagctttagcatctttccttccaaagaaatccaaggctgatctccttcagagtggactggttggatctccttgcagtccaagggactctcaagagtcttctccaacaccacacttcaaaagcatcaattcttcggcgctcagccttcttcacagtccaactctcacatccatacatgaccactgaaaaaaccatagccttgactagacggacctttgttgacaaagtaatgtctctgcttttgaatatgctgtctaggttggtcataacttttcttccaagaagtaagtgtcttttaatttcatggctgcggtcaccatctgcagtgattttggagcccaaaaagataaagtctgacactgtttccactgtttccccatctatttcccatgaagtggtgagaccagatgccatgatctttgttttctgaatggtgagctttaagcccactttttcactctcctctttcactttcatcaagaggctctttagttcctcttcactttcttccataagggtggtgtcatctgtacatttgaggttattgatatttcttccggcaatcttgattctagcttgcgcttcttccagcccagtgtttctcatgatgtactctgcatagaagttaaataagcaaggtgataatatacagccttcacatactccttttcgtatttggaaccagtctgttgttccatgtccagttctaactgttgcttcctaacctccatacaggtttctcaagaggcaggtcaggtggtctggtattcccatctctttcagaattttccacagtatagcataaacataatttttcagtgcactgagaaaccaaaatatttgtgtatgagtaatgctcaaaattctccaagccaggcttcagcaatacgtgaaccgtgaacttcctgatgttcaagctggttttagaaaaggcagaggaaccagagatcaaattgccaacatctgctggatcatggaaaaagcaagagagttccagaaaaacatctatttctgctttattgactatgccaaagcttttgactgtgtggatcacaataaactggaaaattctgagagagatggaaataccagaccacctgacctgcctcttgagaaatctgtatgcagatcaggaagcaacagttagaactggacatggaacaacagactggttccaaataggaaaaggagtacgtcaaggctgtatattgtcaccctgcttatttaacttctatgcagagtacatcatgagaaacactggactgcaagctagcgcaagctagaatcaagactgccgggagaaatatcaataacctcaaatatgcagatgacaccacctttatggcagaaagtgaagaagaactaaagagcctcttgatgaaagtgaaagtggagagtgaaaaagttggcttaaatctcaacattgagaaaacgaagatcatggcatctggtcccatcacttcatgggaaatagatggggaaacagtggaaacggtgtcagactttatttttttgggctccaggatcactgtggatggtgattgcatagtccttggaaggaaagttatgaccaacctagacagcatattcaaaagcagagacattactttgccgagtaaggtccgtctagtcaaggctatggtttttcctgtggtcatgtatggatgtgagagttggactgtgaagaaggctgagtgccgaagaattgacgcttttgaagtgtggtgttggagaagactcttgagagtcccttggactgcaaggagatccaaccagtccattctgaaggagatcagccctgggatttctttggaaggaaagatgctaaagctgaaactccagaactttggccacctcatgagaagagttgactcattggaaaagagtctgatgctgggagggattgggggcaggaggagaaggggacgacaggggatgagatggctggatggcatcacggactcgatggacgtgagtctgagtgaactctgggagctggtgatggacagggaggcctggcgtgctgtgattcacggggtcgcaaagagttggacactactgagcgactgaactgaactgaactgatatgcgatacttggtttattgcagtagtctagaacttaacttgcagtatctccaaaggtctgtcatagctaatacagtaataaaactgtttgtcctatgaatcctggtctaatttttcctgggacatttaccaagccgttggtcaggcatttggttggttttgccactaacagccgtgtgcctgtgagctccctgtcttctctgtggttggctagtcatctaagcggatgataaacagcatctgacacatgaaggcggtgggaggtttaaatgaacaggtgcctaaacagtgcctgcttcctaataaacgctgttatttttgccactgcgtgcatgtgtgcctctcaagtcacttcagtcaggtctaactctttcaaccctacggaccatagcctgccagactcctctgtccatggggttcttcagacaagaatactagagttgccatgccctcctccagggaatctcccgacccagggattgaacttgcagtcctttaatgctgaaccactggggacaccccatgcttttgcggttactattaattaaaaatgttatttttagttttttaaaaaatttattttccagccctaccacttactaatagctaagggctaaaggacagatccaccaggactttcagatggacctcctcacaattactcctgtgcttctgcaaacaccttaggccttcccaggcttgtacgaaagaggggttctttttgtttttgactaaattatttgatttgatttgatgcttagtgcagagtggccttttttttttccttgttcttaactctcatcatcagtttaatgtaattgtccagttgttttttcttttcagtattcttcctgaactcccagttgttggttataattctcttgatgttataagaacctgaccaaatagtgtaatggctagagatcgtgtctatccctataaaacagagcagtaaatagttgaaggctataatgacaagaattttggtcactaggctgagctttcccaatctttgcctcatgagtacatgttgaaaggaactctgaagccatatgagcatacatgtggagagctttagatcaggccactgtaactcttaataaatgctcagttttctcttgttcatacggtcataactgccaccttccagttacttcatagcatttgaatatcaaaaagccaaacatattcctgttttgtaatgtaaaatatttaaacccacctgtgatcctttcatatattctgcatgtttctgattatgtgaatcatttatgaatctagtatttctacagtggatcgtttatcctaaaattcttattctggtaacttggaaatacaggcattaaatctgtgttaattttctttcaatcactgttctcagtgtgtagacccttactgtagtcctatacctatttaatcggcgacacttgaataatacaattgtgtggttggtaaaaatgaattagggtttcaggattttaccaatgggtgacttttaatattgaatgacatgtattaagacaaatgcttttatatataatttatttggcattgtaaatgcatttatcttgtgagagacagaccccctgttgtcagatgaagtattctggaaaggtttggagtaaataaataataaaactactttgatatacaatctaaccaatattaaatattaagactttcagatgattgattttaatacttaattaacttatttaaagtccaatggagcactcttacattaaagattgacagaatttaaaaatgaaacttcatcctttgtctgtctttctcatcttttttttccctctctcatttctcttcctctttctcttatgattaagacactaaaacatcattttccctgaccatcaaatttacttctggctaccagtatttctaaataaaaattttttgtcaattctacaaataatgttccattactgtctaattacaaaaatttagcttctatcagttccttgcctttatagccaagctgtcatattgtaggttataagcccactgtggtaaatgcatgctgcctgtaacggatactcattcatgctctgtcttccctcacccccttttataattgtgctctggtaatagttcatttaagctctttcatatgcttttcttataggagttaactttatgtaaagtaacattactgtcatttcagtgtttgacttctaagcttaccatcagtcaagaatttaaatgaatgaagtatgcttatatgagcttttttgaatatggatgtctttagaagacacgattcagaatactaattctgtgtctctatattagaaacagtaaacgcataaatataagctgaaatacaaagaacttcagattcagagggaataaactattttctagaggttttgtttatgatgccattttaaaagtgaaaattttattcactaacctattttttagctcattttgatgctcacaatatgaagtttatacttatagactgcttgtattacttcactttacatggaaaatatattattttgaaatttcatcaacataatttatctttcaagctttagtgaactcaaccctttcattaaatattaacagttttaacaatacttcctttctttcagatcacttttatcttaagatttaatattgtaacggccagatttatgaagccaatacaacaatccttaagattagtctttgattttcaaagggaagtttcagcgtagtgtgttaatttgtgtgaccagaatggcagttaaagccatgttgtgcagctaagtttgagttttgtgaactttgatttcatgaaaaacagggactttaaatgttatttatattgtaagggtagcaaagaagagataccttctttctcaagtcttagaaggtattttgctgtgctttctgaattagaaaaaataagactgcccttattttaaaaaattctttaccatttttgtcagctagggaaattctaaagacagtttcagattatttaagaaagttgaaatccatcagttatggattaaagtactcattactaagatgcatacttttggtcattatgtatttctctctctctctctctctctctctctatatatatatatatatatatatatatatgtagcttttggtaaagaatccgcctgccatgcaggagaccccggtgattcctagctcaggaagatcccctggagaagggataggctacccactccagtattcttgggtttccctggtggctcggctggtaaagaatccatccacctgcaatgcgggagacctgggttctatcccagggttgggaagatctcctggaggagggaaaggcaacccactccagtattctggccaggagaattccatgaactgtataatccatggggtcgcaaagagtcagacacgactgaacgactttcactcacttcacttcacttccatatagacaagtttaggacatagcaagtatacaagcataagatgaagtggtccattgtgagtttcaaagtgtttatgccactttgactgtgatagtggttgtcttaaaatattctgaaccaaaaaaaaaaaaaagcacccttaattcacttgaattcttcttaaatattttcttgtagtttggtattcacaggtacaaaattataatgtttaaaataaatgcagattacattttttaaaaaatcatttgccatcctgctttgtagtttgtgtatatttttggttgttatagtcacaaaacacaagttggaaaagtcttaagaaaattacttcacatttgaaagcaacatattgtgattttataaggtaatcacagtagcagtagccaacaaaggaatttttattgtgttctgaaaagcaaaatagccctttgtgtttaaaataacagtaacaaaaactaaaacaatgccaacttaataagttactcttcaacttgattattatttaaatctgtatttaaaagaaaagtaaaagcattatccaacctttttattcaacaaatttcttaaaaataattcattattactattcagcatgtttccaggtttcttttagtaaaagcatttcagtgactcagtttcaatctgtaggcataataaattagaatatagtcgatacctgatgctatagaatggctgtacaatggtgtattgggtaaattttgtattgtggttactagggttaccacagacatttcaatttctaaagaattattattaaagctgaaatgagtaaatgacttataattaaatttactatagagtttaaaaggccttaaatatcttgcacaccttgagttaatatttgagcatcattatgttgtagagtatcttatttttaatgtgtctttttgaaatgtactttgatatcagtttattggttgtctagttctcatagagtttaaaataaataaaatccccttatttgtatattttaggtatatgaagtctaaaagtagaaaagtgtatatactataaaaatgagaaactagagtaatgatatgaaaacatagtataggatgctaaagaaattttaaggaagtctgccagttaacttgcaatactcattttcaaatgttgaaccttacatgttttaagagtatgacaaaatgtatggagaatacgaattttatgttgtaagatatccatggccaaatacaggtttgagaggtgtttaatcagttccacacagtttttaaaaaaattgtcaaccaacacaagtaaagagatttcacatacaattctggatttttaacttttcttgaaaacattgaaggaaagaaaaggatgtcccaacagttgacagacccggcatcttacactcccttgtttgatgtcttgtcggtctgtctcactgccttagaaccaagggtcttattgaaacagagggtgagccctcgagccagagaggatgggttcaacacttactagctgtgcggctgtaaacaaattgctccatctctctgtatctcattttctgtggtgaaatgagagtaaggatgaagatgtgtcactgagttgttcagcagataaaatgatgaggatacacaaagtgtttagtgccgtttttgccatatatgcattgcttaatgggtgttaactggagttaatagtaatttttacctggccccatgaggtgtttgagcttggtgagacttctccatagtagaggacgttagtttttaaatctgttcattcatttgatgagtagactatgtcagattctgttttataataaaattgctcatttacactccgtgatcctctactagagtatctttcccagaatttcttctgtgtagttcagttgctcagtcgtgtccaactctctacgaccccatgaaccacagcactccaggcctccctgtatattaccagctcccagagcttactcaaactcatgtccattgagtcgatgatgccatccaaccatctcatcctctgtcttccccttctcccaccttcagtctttcccagcatcaggatgttttccaatgagtcagctcttcacatcaggtggccaaagtattggagtttcagcttcaatatcaatccttccaatgaatattcaggattgatctcctttaggatggactggtaggatctccttgccgttcaagggactctcaaaagtcttctagaacaccacaattcaaaagcatcaattcattggtgctcagctttctttatagtccaactctcacatacatgcatgaatactggaaaaaccatagctagactatgatggacctttgttgacaaagtaatgtctctgctttttagtatgcagtctaggttggtcataactttgcttccaaggagtaagcatcttttaatttcatggccgcagtcaccatctgcagtgattttggagccccccaaaataaagtttgtcactgtttccccttctatttggcatgaagtgatgggacaagatgccatgatcttcgttttctgaacgttgatctttaagccaactttttcactctcctctttcactttcattgagaggctctttagttctttgctttctgccataagggtggtgtcctctgcatatctgggattattgatatttctcctagcagtcttgattccagcttgtgcttcatccatcccagcatttctcatgatgtactctgcacagaagttaaataagcagggtgacaatatacagccttgacttactccttttcctatttggaaccagtctgttattccatgtccagttctaactgttgcttcctgacctgcatacaggtttctcaagaggcaggtcaggaggtctggtattcccatctcttgaagaattttccacagtatgtggtgatagtatgtggtgatatgtggcatagtcagtaaagcagaaataggtgttttcctggaactctctagctttcagtcagtgctccatgtatgatgatttgtacacagaagaagcgagaactgacaactgcttagatttatggcttcggggtttatggctttagaagttttcaccgtgttggcaacaaaagttctgctttcccaagtgttgattttgcctaagcctctccttttgttttaaccatagtctgagagggatagggtttgatgacatctaatcaaagtgaaggtgggtgagaattgaagtcttctaataaaagtgagaaaatattcgagtcattttatgaaatgagcatttttgaaatgaagtaagtagaatagaggagtgttttgtgatgggaaaagattggtcaaagatttgtatgctcgtgagcttttctggaattttcctccaggagtggagacttcatcctgtaagatcacatacacattttggctggaccttcttttccaatttaacatttcacgtttcctcttcctttccccctgctctggaaatttaaaatattttgttacttacattagtttggatgaaatttagtgaacttagtctgttttttgaaagatgttgatatgggaaggtcatttgtactgtatagacttaaaaaaaaacaagtagtgtcacttacaagttcaaaaacactttcatttctaaaaagaaaatgtgtttaaattagaattatttataggaatcagacttgagaaggaaaaccttcaaatcaacaaaagaagacagagctggttatttacataatcttgcctttgtaagtgtaacaccggagcagaatccataaagaaaatacagatatttttggcttcataaagatgttactttgtctaggaaattatatataatttgaacatagagatatattgtgaaaaatatatgtagcatatgacaaaggtttaatatccttaatatttaaagcatgcttacaaatcatgagggcaatcatgataataaactccatccacaaaaacaataacaaatgtcagagaaaacatatgaagtcttcagttatcttactagttatcaagcaaatgcagtataaaacttgattatcatattgatcccccccccaaaaaacccgagagattacttatttctactgttgatgagtggccaagggaaatgaattgttctattatattcaaatctgtctagatcataatttgtcaaaacttatcacaaaatgttatattttttaaaaaatacatgctttggttcagtagttatgcttataagaatttatcctgaaggggaataatcatggatacagtacagagatattggtggaagacattcattgtgaagctgtttatagtgttgggcaattgaaagcatcctgattgtttactaataaagaactgtttacgtgaattgttacagctatgtaatagaatacgaggggtccactagaagtgataatgtggactttttaatgggaaggaagatacgataatttatgtaatcagatacttagcacggcggatcccattaaaactgtacatgttttaaatgctcagaacaaagaaagaatacacataataaacttgaaacattaacagtggtgttttcagctaatacaattataaataattagctatattttctatattagttagctgtgttttctatattttgaaagtttttattgtaaatgtgtattattttgccagcaaaatgaaggatattataaatgtgagaatggtttaagttacaattcagctttttgtgcagaagtgtactgcagacatatgtaattgcatgttgaggtaaagattaccagtgaagttcagatttggaaagtaatttttaaaaagaaaatttagtgctactttttcacttctttacatatatgctatggctgccgctgctaagtcgcttcagtcgtgtctgactctgtgtgaccccgtagacggcagcccaccaggctcccctgtccctgagattctccaggcaagaacactggagtgggttgccatttccttctccaatgcatggaagtgaaaagtgaaagtgaagccactcagtcgtgtccgactcttagccaccccatggactgcagcccaccaggctcctccacccatgggattttccaggccagagcactggagtggggtgccattgccttctccatatatcctactagtgtgtgttaaaagtccctggatcctggagaaagcttgttaatgtttgtaatgctcacttaatcatttcaggtttgcatttattcctagtcaaggcaggaagaggagtatcatttttctccatatttttcatcttccaggtgggcgcttttggtgacactgtccagttctcacaatgtaccattccttgtctgaaactagacatcctctgcagccagaagaacaagaagtgggcactgaccccttgtcaagttactcagacaagcctggaggtgagtttcctgcgtggataactgctgagctgctgggacagttggcagagtgtctccagctagccctgccctagatgtcttcctctagatgaggctgcaatggagaacttttaagaccattttgctggatagatgtggagtgctgtgccactgagtgtcaacttttaattgtagccagacacgttagctgtagccaatgtttaatgcactgtcattcttaaaaaaaaattcataaacagttcattacttcaggataagaattttgaaatacaaaatggtctatgtcaaacatcttttaaagatgtctaaacctttggtgttcatttttgtggggatttttcttctttcagcaaggggagattattatagggtaaacgactttcctgattcttctcttttttttaataattgaaatttgtgtttttcttttaaatatctatgtatggaagttattaagggatcaactatgtttgggcctaccctagaaaagtgtattaaatgtgtatgtattggagccttatagtattttctcaatattaacgatagcatagtatcttagaaggaaacagtacatttgtgacaattcttgaagctttatccttatttcaactaaatatttgctgaagtcgattcatgattcaagtaactacttgtaatttttcactcatacctatagcaggattgtaagatctattttaagaaattacaattagtcagtcattcacatatgttttctgtaatgcaaatagagatttttttccccctatattgatgtaaaggtctgcagtaagtaatgttttgggaattaaaaaaagttgattcctaaacataactatttctttagtacacaaactcttgagtttatggagtgtgtatatgtttttttgtccatctttaatacattccacatcatacaaatgcccttgtgtttaatgaaaatagtgtgcagcttgttttcatgattttatttttatatttgcttctatttagactgctatttaaggttttgatagtatgaaaaaaatgttagtgtttagtttcagcatttaaagaattttagtggtgagagcgatacagtcatccctagtgatccctttttcttaaatgtcgtccctttaagaagtagagttttaatttagaaagtcagattagtctgcagtcacttccataagtgcatatttcaaaagtgaatacatttttgtgttatcaatatataaaatattttcaccaaaatattctggtttgtatgcttatttttgactaaacatttttttagtgtgtatttttctctggactagttcattaaatattgaagttcattttttaaaaactggttaagaaaacatttaaattaattttatcctttattgtttgcagcaataaggtgttacctttactgaaaaggcttttcgtttatatcctagccaacatttctatgacatacaaagttattaggactgaattgatgtttaaaagtgccattaattcatttaccccaaatgttcattaacaatgtaaatgtatgctgatgttctatgagacaaggaagtgactaatgactcttccaactaacaacacttaaaatgaatagaaactttagatagctaatcttgaagtaatcaagaccctcattcagcttggcatctctgtatgctctaaaacagctgtcaactgttaaaaatatacacaaaacacacacaagcgcacgcacacgcaaaagaaagatatgtaaatatctggttctttagagccagaaaggttcctaagcgtggtgggtttgtgcattgtatatgtgaatattttctataaagcgtctatttcgtctcaggttttctttctgcaggacactgtgtgttgcattttaatggggtcgtcatatttccttgaaaaatcatcacctgtttagtgtgttggtttattttagtatatgtctttcatggagttctccacacgtttgaagccatttacactttacccacaagggaatttgtggcaactagatgactcatttcgtaagtagtcagatactggacttaatcagtgttttctctgtgtaaaaaccatgttttttgttgacttgaaaaaaattccttttgcatattccagaagtaaacaaataagtctttaatttctgaaacctgaatttttatatttacacaaatatactacatttctgagttaaatggttctgcgtattctggaaaggattagcaaaaatagccgcataacagataagacagagagaaagttacatatcattggtttactttcatggatgtttgagggaagtgagtgagggcaggaaaaaaaagtatttgcatacactactctacatgcaaaatcttagggcacattttccatgttaattcaacttttaaatgcttgaatttctctttcaaattgaaaacaccacagaaagtatgatattttctctgttgaatttggttatgtaccaaaattatcatcttaaacttcaagatctttgatcaaaaggtattactaattgacaagttacctataattcagtttaaaccataaaaaaacttattttttcagctattcatgattattcagtcctagcatgtaactaacttttaatgatttaattaaatgaaaaagtaatcattttaaactaaaaacaacaaatatgaagatttacggaaacttaacctattactactaatgaaataacattatcagaatcactagtttttttccaagcttataggagattggaatgttactcatgatgagaaaacattttcctcttttaggtctctcttgagaattacagtttgttacatatagccagagtttttagctctaattttatatgccttcttacttaacagcttttatagtattcagataattacttaatgtaatacctttttatgtaatatctgtttcaaagctttctttttggctcttgtatcaaatccttagtaacctacttgaaaaatatctaagacattcggaatatcctgcctacttcatttttgcctctttgcaatttttttgtcccaagtcttcctttcttttggtttattatatcatagaatttcatggctgaaaatgggtgcctggctttattggtgaataaattggggtgataagatcagtttaccgtagttgatgtgagaaaacgatgtggtcctcttgccatctttagtgtggctttccaggtcctagaggcatcactgaactcaggtttgggtgcttgccacttgaaacgtccacagccatgtgacgtgggctgcccgtccagcgcccagggagaaggtgggctagtgtcccagaagcaaccccgaaggctctgctcggctgccgccgtccgccacgtgggcaggctgttggcgccgcctcatctccctcctcactcagtctctgtggtgcaattagtgaaggggaggctgggagggagatctggcgatctctcaactccttcttcatttcttctttgatctgtaaagtaccaacatgctaggcaaaatattatgtaatcagaatatttgaaaagtgtgcttaggccagaggataggtaaaatgtagctttattaaagtgacaagagtggtcccttgcagagagctacttcctacaataaactacctgtaaacatgctgcttacgcatcacccctctcagacatcattccatttctatgggattatgaacaaagatcctttttcttaacgtggaagatgctgacggtctgtagcgtctctttgttgatagtttccgttgcctggctgtgtatatgggcacagcaagccacaattactttgatgcccacaaagatactcatacagttgatagtgttaatcctcctctgtttaagtccaggtcttataagtgtgctagtcatggaatcaggattactcaggacggagcagcctgtgtcttgactacagttgggtcaccctgtggttggcttttcccctctgatggcagttacagtacctgtaaagccactcaggagtgttcatcagaccctgaaagaccctgtgcctctgtcgtcttaatcattgactacgtgagcctactcttttgtgacccagggagacttgggacattttagttattctacaaacaggaggcagtgggtgaggggggaaccttgtacttgggacaggactggcagggttccgcttggtttcagatgcagtctagagcggagatggatttgtacagaggggcagggtgttcttattctcactgtaatagcaggaaggatggagaaacggtatttcggtgcggtccattcatctgtttgatggcagagagtaaaataaagtatcactgatactttaatatctttcttgatatcttagggtgaggtaatttgctgatagtgagttaagatgaagcatttgaagatttggggagagtaaaaaaggttagattgagttggtaaagaatgtataaccttggggaccaaggtgagtttaaacataatttataggtgatacaaacttgtaaatgtgtatgattgtatccagcagaattcagttcctaggacttagccacaacgaaaagcagatggttgctttgtcaggggagtataacaggtagacaagtggacaaggaagtttatggtggaagaattcatggatggatttgagaatagaaagaagtttgccgcggaaagagggcagagttatgagagggcagggtagaacgtttcgggagggagcgagttaggagaggcgcagtggaggattgcagggcggttgggaggcgcagaagcgtggggcagcgcgtccagcggtggtgactggtgagtcagtggagcagtgttcagcgacagccagctcacctgcgccgcaccttcgttagttctctgcggtaatgtaggtctcattgatttggacaggttttggtttgaagtcttcttcttattattccaaagactcttttaaggagcagttatagcttcacagcaaagttcagagaaaggtacagatttcccacatagcctctgctcccacatgtgcgcagcccctgtcttacctgtgtctgccgccagagcggtgcttttgtgacagcagatgagcctacactgccccttgctcggcagtttaccttgggacccactcttggtggtggacactctgcaagactggacaggtgcgtaaagacgcgggtctgcccaagcagtgtcacgcaggagtatctctgcaacattctctgtgcttctccctgtccatcttccccatcctttgctcctcaacctctggcagacactgatctttgtactgtctgtgaagttttgtaaaaagtatcatcttaatgaagaattctctgtggattttgaggagaacaacagtttagatagatgaagaactgttagtaagactgttaaatcattaaggaaaatggtggctttgttgaagatacagattactaaataagtgggagagtgacttggaagttcctaaatgacagtaacaaggatttttaaaatgaatggttttaaacatctccttaacaatggcctttgtgaagcggtgtgacggcaggtagaggtggccttcaagggccgtgtccgtgccgtgccctgtccctgtaagtcgcagcgtccagaagaaggctgggaacagggggcttcagcgagaaaggctgcgcgttaggggcgtgaaggccatcccccagcgaaaccagatcagatatgaggctgccagggaacaaagagaggagaaaagaatggggattgatcggtcagaatttctcatgagcagaagtggagagaaggagcggtatttgacaggagtcaagtagaggggaagcgaaggaggggccaagattatcgaagctgcagatgagagagctccccgcggcccagcgcggccagcgcctcagcaccgcctggctacaggctcttaggaggagacagtctctgatgggaaaagggttgatgacctgaaattagcgggcaggtattttcaagatactgctcactgacttgagcgggtagaagggaacccaagatctaatccagaattaacctgaagatgtagtgttgaatatcagtggtaaacatttacatggcagcaaagttcaacttgctctctaatgttagatttagatgattatatgtagattttctgtattcatgctctcatagtgaattgagatttagcaagttagacattttaatgataacagtgaaattcaccgttagtaaaatgaactcttgaaagtaaaagaaatgttaaacgttgtttatctatgctcggctgtgccgagcctttgttgctatgcggctgctctctagtctggtgctaaggcttttccctgtggcagcttctcttggtgtggaacacggcgtttaggcgcctgggcttcactggccgtggttcctgggcccgagcgcacaggccaagcagggatcgagcctgtgtcttctgccctggcaggaggatgctttaccactgagccaccagagaagccccatgtactcttgaaattaaaaaaaaaaaaaaaaaaattggtatgaattttgagctctttctattgatttgtgtattccttagtatttgaattcagtttttagttttatttgaacttttctgttggtgtagcaattccctgtattaagagagaggctccttttcagttccttcagcattcggattttgtgaagagtcattttagttgtcccggaactttttttcatttttgttgtcttaagagtttaagtttttccagtggtcatgcatggttttccagtggtcatgtatggatgtgagagttggactgtaaagagatctgagcaccaaagaattaacgcttttgaactgtgctgttgcagaagactttttcttgagagtcctttggactgcaaggagatccagccagtccatcctaaaggaaagcagtcctgaatattcatcggaaggacttatgttgaagctaaagctcaaatagttcggccacctaatggaaagaactgactcattggaaaaggccctgatgctgggaaagattgaaggcaggaggagaaggggacagcagaggatgacacggttggatggcatcaccgatttgatggacatgagtttgagcaagcgctgggagtttgtgaaggacagggaggcctcgtgtgctgcagtccatggggtcgcagagagtcagacacaactgagtggctgaagagcaaaggagacctccctgctcgccctggtggcagaaagacccagtagccctgcccactgcccctgtgggcagaggtgtccactgaggagaactccctgctcgccctggtggcagaaagacccagcagccctgcccactgcccctgtgggcagaggcatccgctgaggagacctccctgcttgccctggtggcagaaagacccagcagccctgcccactgcccctgtgggcagaggtgtccgctgaggagacctccctgctcgccctggtggcagaaagacctagcagctctgcccactgcccctgtgggcagaggcgtccgctgaggagcagccacactttgagagactttgtcgtgatgctcagtcaacctttccaacattccttggtccccaaaagtgagaagctatgtgatgggtggttttgtttggctgggtccgggcatgactagagtgatagaggtgattctgtgcaacagtattctcttaaaaccttggaaaaatgtaaaccaaagagacgcgctgagatgaagtgacctccagtggctttcttatcaaagaattgcgctagtggctttctgctagttcatcagtgggaccagaaaaccagtagaatagagagcatggctaactttgaccaagcttagaacactagtaacagtttgcatctttaattagacttgtgaatacatctgttttgctgaacttagattttcaatcagaaatggtgacataatggttaagaagtttcagttatactcagtaaatgaatagagatcatagagacacacatatttttatcatacctggtatgggctgcaggccacaaacctgatatttattcattcattcattcaaaaaagtggttgatcatctagtatctggggagagactgctaaacaaatggtccaggtgctctctttcaatgaaattaacattttcgcatgagagagacagttaaaaaagaagaaaaaaggtgggaaagtacagaaatgagaaaaagtatcagaatgatgagtgctaggcaacggttagagtggtagtctaatgaacggctgggtacagactgcagattttcagagcagcgccctctgagaaggcgattggtcagtgacatgagaatgacagacagcaaggagccaggcatgcggagatggtgacgggggcgaggggcgggcacatggcacagagagaagcagcagggaaggagacagctcatggagcgggagttcttacggggcgggggcggggggtactcctgtcctgttcagggtgtctgcagatggctggggcaccgtgggggtcgtgcaggcgggtctagcaggggctcacctcggggctgttagccagtgtggatggtgttctgaagactaaagtttatttagcatctgtattgttctctctgttgtactcttaaatctcttttcaagaatgagggccgtaactttttttattatgtatccttatgacttgatactaagcatttattaagtaatgcctgatttacacagagttgtatttttaaatttattttcatatttagtcgtctatgctgatctttatttcctcacgctcaatattttaactctgtaatagtgaagtaatttctgcttaacctgagataaaagaatgtcatagaattaaccatttatctaaagctcagttactactatgtgatctgttttatgccatgctactaatattaaaatagtaacaataaaggctgtcttgataagaccttttctgcttgacccattgtgtacgccatgtgtaggagactttggtgggtggtgcaaataatctttattttctctttgctgaagtaatggaaaatttgttcctctaggacatattagaacaatgtatttaatgctcttcaatttaatttgctagtatcacaattaatacaattaaggtcacttgaaatgaaactattaacaaattggctaatttactttaacaacgtcaatgtgttctcacaattacatttgctttaattagtgcacaagctattatttaatagcatacttcacacagaaaaatgtaataatgcattcttggctccttatagcagaaaggaagaaacttttaatgggctgagtgattttgtggaattgctgctagataaaaagtgatggaagagaaagcacaaagccagaaagcaaagcctgtaagatgtaaataaaacaaataccttttggcacttaccaacgcatgtcctatttatcattgtgtaaatagtatcagaaacttttaattaccatttaaaaataaaagaacatgggtccttgaaagttttgtgttcagttttatccagtttttgcttaatactgaagtaatgtttcacttcttgaatagcataagtagttaagttaattactagttaaattattatcattattgcaagttaattaataaaataattaatcatgctaataggaacagaatggtgtggcatataaaaaaagtaggaagccaaaatgtgtttgaattctcagtttgacttttattttctattttgacatggatatttcttaatgaagagttcacttttctatctggcctactctaaatgttgagatcagaagactcggggaggaataactggttgtttctgtttctatatatgcagagtaagcaaaggagatgaatggtcaaccaagccataattaataatatttgctcttctccataaacctgagaacgagatttactatcatataatcagtggtgattttatgtgcaagggggataaaagcagtccagataattcaatactgtaatttaaaaaattagtttgacagtctttttgcctaatttgattgatgaatgtttctattgtttttatcttctttcctttcattctttgcttaatgacagaaattcctaaagttgcaaataaaaaaagaaaataggcagaagattaattagctagtaaatatttaaatataaaatgcaagaagcttggggaatctagactttaaaaaattaaatgtatctctcatttctaggaaagaggttcataggagtatatttagttttctagtgcttgagactcttgatgcaatccatggactctcattttatgccctaaattttgaattcagtctaccagggcattcacagatcagatgggtcaaaatagagtaatttacaagaacagtctacttagcaatagtagaaaattagttaggtgattctttaaatagcattttgagttttgcaggggtagactgctgcttttagttagttgctatatgtactacacaccgggcttccctggtagttcagttggtaaagaatactcctgaaatgcaggagacttcagttcgattccttggttggcaagatctgctggagaagggagaggctacccactccagtattgttgggcttccctggtggctcagctggtaaagaatctgcctgccatgctggagacctgggttcaatccttgggttgggaagatcccctgtagaagagaaaggctacccactccagtattctggcctggagaattccatggactatacagaccatggagtcacaaagagctggacatgactaagcgactttcactcactacacagtaagcagttctcatttgattcttactatacatggtctctaaattctatcttgacttttaatagttgttttaaattatttgtctattgagtccttaacctacattatagactattagaatagtaaccataatctgattatttaaatacttgctctttaaaatgtaaaggatttaaaaataagacatctattcgttttctcaaaggagtccaaatgcaagaagttaattagcttcttgctttcttccaaatctcgcctgcacatagtcttcattcttagttccttttttatcttgtaagtaagaaattgccccaaacctggtggggtgtttttttttgtttttgttttttgtttttttttttggctgcgagatcatggcagtgaaagtgctgagtcctaaccactaactggactgcaagagaatccccccaaaacttttttaaagaaaataatatgcctttaaagtgtttattcagtgtcaggtctcaggattaattgttgcatgccaagattatagcatttcagaagcaccttatgagtagcctgtgggggccttttttttttcttatgaagtgatattgaaagaaagttcttaaagaggctaaaagaactttgcagcctggttttctgcatttgtttaatcactttccagtgtaaaactacacaggatttctctcttcaagtccaccacccagaatagacaatacaacattgaaggagaacaaaattagaagactgacaatgtctgacttcagaatagagaggacagaaagacccatacaaatagagttaagtgattgatactgacaaagaagcaaagccaattaaaaaaaaatctagacattgattttatacctttcagaaacagttaactcaaagtggatcatcaacctaaatgtaaaactataaaactcctagaaaatgacataggtgaaagtcttcatgatcttgtattttgtgatgacattttagtttcaaaaccaaaagcatgatcaatgaagaaaaaattgataagttgggtttcattagaattaaaaccttttttttctctttgaaagacattaaagggactgaaaggcaagccagagactggcagaaaattgtttacaaaaattatctgataaacgctggtatctaaaccaaacaaatttaattacccagaaataagaaaacaaaaacccagtagttaaaaaatggagagaatatctgagcagaatataccgatgagcagaggagaagatgatccacgtcacaggtccccagagaatcgctgattaaagtgagacagcagtgcacggctacgggaatgaccgaggtccagacactggtgccccgtgccggggggcagcgcagcagcaggatcacttgctcagagctgctgggcacacagagcggcaccgccagttcagaggacggtgtgacctccgcttacaaaactagacctactctctgtgtgatctagcagttgcactccttggtatttacccaaatgaattgtctaaacataaaccatcacacagtgtttctagcagctttagtggtgattgccaaaactggaagcaacccggatggccttcagtcggtgaatggatgaacaaagtggtatgtgcatacaatgtcatcattattaggtgacgagactgaaaaaatggtccgtgcatacagtggcatcattattaggtgccgagactgaaaaagtggtaactgcatacagtggcatcattatcaggtgacgagactgaaggggccttcaggttgtagcaggacaagcgggaacctgaggtgcgtgttactaagtgaaagaaggcagagtctgagcccaacgctctgatctggtaaaggcagtgccatgaagccagtaagaggatcggtgacggggagggcttaggcaagagggaggggtggataggcagagcacagaggctctttagggccacgacgctgttccctctgctgcagagagacagcagcaagaccagcagtgtgttcggacatggacacgagagtcacagatctcacaatgcctttaaaactggtaggcctgtctctttaacactagaagcactatatatatatcagtataagtgatatacatctcaatttactttgttttctttcattattaaaaggtgatgggaatagtcatatcatacttgaaaatttatcagaattgatctatatactctaacgtaactcgcaactttttatgttgctcatatttcttttaagttattttgtattgttgtccagtcattttgcacatgtgaagaactgacacagtattctctttgattttgttaaggacatgccgttgggttaatgtgggtacctcattcctctcctcctcctctttgtgcgagtacagagaccctgtgttggatcctctgatttcactggggaaggttgattcagcctatagaagcttgtgtactcagtgttacttgttatcctagttaaatgacccccacggtgctgggaggagcacaagggttatatctgaaccagaagtgggggactttctgtcagttgctggatttgttcctgatcagtttgttcctgaagttttagttctacttacaatgtagtataacctaagttatcttatcttttgatggagccttatgattagatgtctcccaattatgacgtcaagaatgtggcagatttcatacttagaaatagcatcgcatgccatattgtgttgagaagtccattcctgcccttaaggatgaaacctgaagctgttgtagcctggctttctgtcaaggctgctgtcttaaccgtacccagctctttcttgctggactcacttcgactctggtcattccctcacgtcagctgctcctcagtggagatgctttatccaccgtgctcttggttgggaacctctttttctcttataccagggtgcattgatgagagtaaaacatcaccactgaggtgaaagtctttgcttgttttccatctgagagcagtattagaagtccacgcactccagatgattcacagattactgttaggggtaaagggaagactgcctaatgtacttttcctgatacttggaggattgtctccaatctgtgcctattaagggcagtttccgcaatcagttatctgatagcttttgagaaaaacttctgaagatacaattatggttgtcatattcaggcagctatatttaatagttaatgtaatcttattttaaaaatgtatattggatgggtcaaaacggccagtagacagtatttagtttttagtcattatgaggttaaattactttttgcatctgtcaggcatattttaatagtcctttatgtacatttaattaattgcatgttaaaatcaacatgacaagtaacttagtaacaagttaaaaataaatcttttgtcttgttaatcaaacttcacacaaaaatgtagtaattaaatatttgacatatttatgcttttaatgatttcagtatggggttaatttgatacatgtgaacactgttaactatacagttcatacatgaattttgaaattatttgtgtaatagaatcattgagatgcttttatattgcatttaaaagcttagtaaagtttttaaaatagtaaaatagtgttttatactactagtaaatagtaaagtctgcttgtgaacagatcggaactgaacagaaattctgttcagtaactggattggccagtcaaatgtacaggtttgagttttctgttcaagccacaaaaaaaaaagtaattgatttgagccattttaccttattgccaaggcaatataagtaggtttcatttaaaccttttatataatcaaatacatggaagcaattaagtttggaaacctggggtctaccaggagcttcttggaaggggaggaatggagacttttaaatggttgttaatggcaatttatagaatttctctgtaccaacttgcagtgcttaatataggctatatgattttagagatggctgttacattaaacctctctccaaagactgagaggtgctgtttttatgaacatctaggcaagggactaagtgagttcagatgcctggcttgagtaatgaaaacaccaacaagcatttacatacttggtttaatttcttgccattaacacacacatacatacatacacacacacagattaggggtatatttatgcacaatctggccttttaacaaagaaaaataagcctatgtttaggctgccactgctatgaacaaaacagctgagattttaatgaacaccatactgagggcatgtaggacataaggcgaattaagcaggttacaaactgcacatcttctgtttagatagaagagatctccccagccctgacagtcagttgtactgacaaggcaagcggatagacagagacagaaggagatcatttgtatcaatttgagaaatagagctagtagtgaaacaaactagctgctcaaaatagcctcacttttaatgttaaaattactctttctctattttcccccaaaataaatacttatggttaaacaaaaccttattttattttgtttataaatgaagacaacattgtttttatttttattttattttaagaggagattttctggacactcaaacaaattttaatcttggtaacctgacagctttgtttaaacactgaatatgagtttcctttcatgaaaatcttttcagagtatagcagttcagctgtgaaagcctgaatacattaatgatgacaaagaagctccagaatgagccaacatttgttttgttcttttacaatatttcttgataaattgcataaacaaaagtgttgcagggttattttaaaattttcctgtttctttgctaataaatgtctttgtgtttactttttagatatattaccttattattaatcactttattttttaaacaaagtgactttaagaagtccttttttaaaaaatgtgacttaaaagtacatattatagggaactctttaacgttgcctttcatgtatgtggttaaatatcaaaatgcattattcatatagacttgataattttcttgaaaagtaaacctcttccaaataccagacaattgtgttctgaaggtgtttatttaagatcatttacttgatatcttaaatgattaaagaagatgagtcatttgcaaagaaagcaatattataatattttagtgtaatgctctttttaagggtcgcagtttgcttatttaacagtcattcttatgaagagtgatactgttaatctttctgaaataaacgtttcttattgagaaatttttattttttaatttgcatatgtgtgtcctaattcgtttcagagttttgaggcatgatttgagacatagtctgagaagattagcttttcttttttgatttttaaagttctaatgtttttctattctgtttacaaaatacttttcttaaaagcatattgtaaaacttttgcaattttagaattagtttctaaaaaattccttgaactactttttgatgtattttgcgctgagagattgagcatgtttccaaatggtacgtagctgagctcagtaactaaaatgagcggtgttggtcacttatatgtttggtatgcactgagccatttggttcatcttatttgtcagtcggctatcagtttgctacataacaaaccatccctaaactcagttctgtaaaacaaaagtgtttatgattgctaatgagaaagtgcctaagcctgggaatgctcttgctatgggctgaccttgctttatatgtttggggaatggctggtccagactggcctcacttgggtgtcttgagattggatgacaggtgacatgatagagtgactgagtcacatgtttcatccttcagtagtccagccatcatgcacgtactggcggtgtcagcattcgtgaggacagacagaaactgcagggttttgtgagaaccaggcttattactggctctgagaaacctccacagccttctgttggccacagcaagtaacagtgccagccgcaatagagcaacaacaaaaccgcatttctgtagactagcaatgaacaacctgaccgtcatttaaagcccagagtctattcacagcagcactaaagagttacatactcaggagtgtgtgcgacaaaacactactgtaaggaagtgtaaacatggagagaaacctggtatgcatggataagcaacacattattgttacgatgccactgcctctcgatggaagggtctggaaaaccacatcataagaggcgtgcaataatcaggatcatttacaccaccagtttgctatagatgctgaagcaaagatgtaagtaagcagttatacaagtattttatgttaacaagaaccagtccaaaaagagtagtgtgacagaaaagaattaactgcaaatctagaactattgactgaaaaataatagaagaagtaagagagctcaaataagagaactcaaaggtatttcattgggaaataaggaaacattatagtttcctgtatttctgtaattattactgtaaaaatactttacatgtgaaatgagttaataagatctttaaatgaaatttttaaacaagtgtttaaattttgtcaatttccagaaagattctttgaacgtggaaaatatctttctaaaatttattcagaattatatgctgattaaaaagcaagaaaatatagtaaaaatttttacggtaacaaatttgaaaactaaaacaaagtggaaaaatttgtattccaagagaataacagagactaaagacagttaagtacatttacatagaatactaagtactttgtaaagctagggaacactcattgcctactgagttgtatttcacacatgaaaaactatggctacaaaaatatgtcatgtacaaagagtttatttgaaaatgggaaaaattatttgtcagagtgatttttataaatacacacacctgtattttgtggatcacaaacgttgtaagaaaaaaaatcttggtgaagccataataaactattaatataatggaaaaaatacttaatcatatctcacagagaaaacgctagtcccaatttggagacagatgattactaaaacaacaacaacaacaacaattttgctctcattaaaagttctttcagagaattgaaacatagggaatgttttcacattcatatcacacggctaatataacagtatcagacaagggctttatgagaaaatacaagctattcttgtgcatgaatatcatacaaataaaataccggtgaactgaatggaacaatacgtaaaaggataacacatcttatcaaatcttgtctgccctgggaatgtaaggtttgttccttacaaaaattttttaagtcattcaacttattaacaaaataaagaagaaggtcatttcagtagatacagagaaactattgcccgcatttcctggtggctcagatggtgatgaagtcttcctgcaatgcgggagacttggtgttcaggcccttggttagaaagatccacaggagaggggaatgacaacccattgcagtcttcttacctggaggatcccatgactagaggggttgggcgggctacagtccatattataaaaagaatattgcttagcaaattttgaatagaaaataaaacttccatactatgaagaagagcaggtataaaagaaccatagcaaaaccatcctcagtgatggaatagttaaaatgttctctttaagaatgggaacaagataagaatctatagataaactattggaattaacaacttattttacaaatattccctgatataaaattaacatgcaatatcacttgcacttagaaatacacaagtaataaagtgttttgtagtataaaaaaatgaacatccttgaataaattcaataaaaatatgatagcttttatggagaatattatgaacctttatggaaagacatgtaagccctggataaatacagagattgtggaagggatagctcattgtcacagagctagtaagttgttttcaagttgatacatagattcagtgtacttttaagtcaaaatttcatcagtgttttttgagtaactttgggtctgattctgatacgtacatacaggaaggaaaggttcaatagctaagacacttctgaagaacaaaggtgtactgtgtaacaaggaaatatggtaatggcttgacaaatagaccaatacaaagaacagaaagtcagataggcccccacatatattaaaatctaatacatggcaaaactggcattgcagatcagtggtaaagaatgggcttatcattaaatggtgctgaagacaactgattttccatatggggggaaatgagaatgaatctctttttcacgacttatgggaaatactagtttctcccaaattatgattatcctttaagcagcaaaatatttaagacaaaagacaattatgtagaattagattgagtttgtcaagaaattctttccaaagatatcataaagaaagtgaaaacacaagctacaatctggggaaagataacaatataaaaaaaaaattaacaaaagcttgatatccaacatatagaaagaatttctgtttattactaagtaaatgacatgaacaggcatacattctgtacaaaaggaaatatataatggccataaatgtaaggaaaacctaaacaacatctcagattgtgtattagatttttttcccccaaactctaagccttaactatcattggtctattctccatcatgatagttttgtcacttaaagaattttatataagtgaaatcgtgtagagtataacactttttcattggctttcttattcacaaacttcagatctaagttgttgcgtatgttggataaacagtagttgttcctttctattgcaggatggaattcctttgtgtgaatgtgctatagcttattctcttatgaaggacatttgggtggcttacagattttagcggtcactgacaaagctacacggagcatttgtgttcagggttttgtgtggatctacgtcttgctgacctgtgttccgagtagttctactgttttacttttccatcagcaacatgtgaaaactccagttgctcggcatcctcaccaggattacattgtcaggaattttttacccattctaataaggatgtaatagtattaacttgtggtttaattttttgaaaagaccctgatgctgggaaagattgaaggtgggaggagaaggggttgacagagaatgagatggttggatggcatcaccgactcgatggtcatgagtttgagagttggtgaaggacagggggcctggcgtgctgcagtccgtggggttgcagagagtcggacacagctgagcgactgaactgaatggctaatggtgttgaacattttttcatgtgtgcatttaccatctatatcctctttggtaaagtgtttgttcagcttgtttgccaaattggattttttttttttactgttgagtttagagaattctttttatattctagatacaagtactttgtcagatatgtgacctgctcatattttttccttatctctggcctgttttttcatcccttctaacagactctttcacagaggaatttgttttattttgctgtatttttccattgatgaaatatgcttttggtgttacatataaaactcatgttagatagtgaaagtgaaagtctcagttgtgtctgattctttgcaaccccttggactatacagtccatggaattctccaggctaaatactggagtggttatcccttctccaacggatcttcctaggaattgaacggggtctcccgctttgcaggtggattctttaccaactgagctatgagggaaaccccatgtcagataactctttacctaaccctaggtcatgatgattttgttcttctgaaagttttatattttacatttagattcatgagccatttatttttatttttgtataagacatgagatttattagttcagtcactcagtcatgtccaactcttagcgacaccatgaaccacagcacgccaggcctccctgtccatcaccaactcccggagtccacccaaacccacgtccattgagttggtgatgccatccaaccatctcatcctttgtcgcccccttttctcaacctgccctcaatctttcccagcgtcagggtcttttcaaatgagtcagctcttcgcatcaggtggccaaagtattggagtttcagcttcagcatcagtccttccagtgaacacccaggactgatctcctttaggatggactggttggatctccttgcagtccaagggactctcaagagtcttctccaacaccacagttcaaaagcatcagttcttctgagctcagctttctttatagtccagctctcacatccatatatgactactggaaaaaccatagccttgactagatggacctttgttgacaaggtaatgtctctgattttaatatgctgtctaggttagtcataactttccttccaaagagtaagtgtcttttaatttcatggctgcagtcacctcagcataataaagcctatatatgacagagctacagttacattcatactcaatgatgaaaaaaagctgaaggcatatcctctaagatcaggaataagataaggatgtccactctcaccacttttgtttgacatatttttggaagtcctagccacaggaatcagagaaaataaaagaaataccagaaaactatagagctcattgtagaatacaaaattaatacacaaaaatctcttgcatttctatacactaatgatgaaaaattggaaagaaattaaggaaacaatcccatttaccatcattgtagaaagaatatctaggaataaatctacctaaggaggcagaagtcctgccctctatacgacactggtgaaggaaaccagcgctgacagatggagagacacactgtgccctcggactggaatagtcagcatcgtcaaagtggctgcttacccaaggcagtccccatcagattacccacagcatttctcacagaactttaacaaaatgtttaaaagtttgtattgtaacacaaaagacccaaagagctgaataaggatatatttgggggatgagcagaaaaaactatttattgatgaattgacagggcagttagcgtgagagaggaattcagaaaaattcctagatttctgtcttgggtaactgattagataattctaaatactgatatgttggaaactgggggaaaataaagtttgagagaatgggagttgggagtataaatcaaaaatttttgttgtcctgtgtcataacattcgaggtatatggtagataatcttgggcagatgttccctgaacagatgtgagtcagacagtgtgcgaatgcagtctggaggtacagatttgggtcatatcagcacgaggatgatgttggatttgcgagtatgcaaatattggtggggagtggaaattcaagacatgaacctctacaggtggtggataaatgtttgataccctcaatggggattctgaaaaattcataaaagttataaacgtaatagggtaatagccaaagaacataaacaggcaattctcaaaaagtatttagtattttagataattattagtatgttcactaattatttgcagaatgacctcattttccaaattagaatgacgttaagccaagataatttttttttaacaaattgtcaaagatttgaaatattataaaagatattgcctgaggtctagagagatggacattttcaaaatggaagtcagttgggcagtatttatcagaggtctaaatttgttcttatcaattaaccttattgtttaatttattttctgtttttgaaatcctgtgataattttcctgttctctgtggatttttactttctctgtcaacagtgcatcaaaatagattagactatgaatagctggttcaatgtcagggtcctactcatctgaggttctaagtgcgccttctaaagactggaatagctctttgcgtgctgttcactctgtgttggtcttcgtttctttcacatacctttcagcttctttctcccagtggatgatggacggttgtccacaggacagaggaacttataataaactttgaaatgttcacttttacagacattgtgcccttaaaaaaattatatattgaaatctgaacccccaatgtggtggtattagtatgtgtggcctttgggacatgattaggttatgagggtagagcccttttgaatgggattgctgctcctaagtcacttcatttgtgtccgactctgtgtgaccccatagacggcagctcagcaggctcctccgtccatgggattagtaccattgtaaaagggacccctgggagctttctccctctcttcataccatgtgaagacagtatttactgtggaagccaccaggtctgtggtatttttcttttagcagcccaaattgactaagacattctctttttaaatgaattaaataagaagcagtatatggtttccctgtttagcccaaaggagaacaaagatatgatgaaacttctccttcagcaaacatacataaactcagattatgacagagctttttaactcagtaagtgctgtaactcagaaatttgttttgatgaatagttagtgttccaggaaaccatttgctaatgtaactcagtctatactgtattcctaaaaactaaaggagagcaccagtttttacccaatggttattgactctgcctatgtgtagtttactataaataaagtctctcttcttatctcttaatttcctgtctcttcaccattattaggtgcattctttaacagggtaacatcctgtttggaaattacgcctggtgtaaaagtgaagctgatgagttcttccccttgtgagacataagcctgtgtttgttccaacatgtattataagtaggtgaaagcagcatctctttaagagagtcaaataagatttgattacaagagtagacttagccagcacatgtgtttttgtctttttacaaaagttgtacttttctctactttgtaaataaaaaaatataacctctagtcagtaaaaaaagctataaacctgtccatcagtagatatttccaccttaaagtaaactaaattctcatcgaattggatttagtgactcatggctagaacagatgttatcttaatggaggagagaagaagaaaattatgtcatgagccacagttcagttcagtcactcagttgtgtttgactcttttccagcccatgaatcgcagcacgccaggcctccctgtccatcaccatctcccggagttcactcaaactcatgtccatcgagtcagggatgccatccagccatctcatcctctgtcgttcccttctcctcctgcccccaatccttcccagcatcagagtcttttccaatgagtcaactcttcacatgaggtggccaaagtactgaagtttcagcttcaacatcagtccttccaaagaacacccaggactgatctcctttaggatggactggttggatctccttgcagtccaagggactcaagagtcttctccaacaccacagtgcaaacgcatcaattctttggcgctcagctttcttcacagtccaactctcacatccatacatgaccactggaaaaaccatagccttgactagagggacctttgttggcaaagtaatgtctctgcttttgaatatgctatctaggttggtcatacctttccttccaaggagtaagcatcttttaatttcatggctgcagtcaccatctgcagtgattttggagccccaaaaaataaagtctgacactgtttccactgtttccccatctatttccgatgaagtgatgggaccagatgccatgattttcattttctgaatgatgagccacagaggcacttccaaattatattcattgtcagtacaagaaaagttcaaaactctacttgctaccatttgctaggaatgtaccagaattcagtgttttatacttttatatataaaaatatacatgctgacttttaaaactacagttaaatatatgaagagtgaatactggaatattcaggcaatttttaatgttatagattcatatttttgtttctgtgtttactttaatatgctgctatttaatcctctataaaaattacacatttttgtaacttaaattgctcaagatcaataattattcttttacttaatctctggtaattcaaacatactttcaaggtattgacacttaggaatgttaaccaatgttgttagtttttattctgtgtgttttaagtggaacaactgttgcggattgaggtcaaaattgtagcttattataggattagtatttgttgactttttttctttccgttctatttcagtgattgattattgcagctacagtgactgagttgggcagaataagctgctcaggaaacattagccacacatcttgtgatgacattaatatttagaatttagcagagctgtcagatctttagtactctcattcttaagtgttctggtttggttggtaatgtaaaaaaaaattctacctcaggtgtcctcattcactgtaagatttactattcactgattgctgggagaaatatcaaaacttcacatatgcagatgacaccacccttatggcagaaagtgaagaggaactaaaaagcctcttgatgaaagtgaaagaggagagtgaaaaagttggcttaaagctcaacattcagaaaacgaagatcatggcatctggtcccatcacttcatgggaaatagatggggaaacagtggaaacagtgtcagactttatttttctgggctccaaaatcactgcagatggtgactgcagccatgaaattaaaagacgcttactccttgggagaaaagttatgaccaacctagacagcatattcaaaagcagagacattactttgccaacaaagatccatttagtcaaggctatggcttttccagtggtcatgtatggatgtgagagttggactgtaaagaaagctgagcgccgaagaattgatgcttttgaactgtggtgttggagaagactcttgagagtcccttggagtgcaaggagatccaaccagtccatcctaaaggagatcagtcctaggatttcttttgagggaatgatgctgaagctgaaactccagtactttggccacctcatgtgaagagttgacttattggaagagactctgatgctgggagggatttggggcaggaggagaaggggacgactgaggatgagatggctgaatggcatcacagactcgatggacatgagtttgagtgaactccgggagatggtgatggacagggaggtctggtgtgctgtgattcacagggtcgcaaagagtcggacacgactgagcgactgaactgaactgaactgatatctctagatatatcagaatcactttgctatatatcagaatctaacacaacactgtaaaccgacgacatgccaatgaaataaaataaataaaatattaggagagagtttgtggtgcgggagaccagggatcgattcctgggtctggaagatgctctggagaagggcatggcaacccactccagtaccacggatagaggagcctggctgcagtccatgggatcgcaaagtgtcggacatgactgactctgttcagttcagtcgctcagtcgtgtccaactctttgcgaccccatggactgcaacacaccaggcttccctgtccatcaccaactgctggagtttactcagactcacgtccatcgagttggtgatgccatccaaccatctcatcctctgtcacccccttctcctcctgccttcagtctttccaagcatcagggtctttttaaaatgagtcagctcttcgcatcaggtggccaaagtattggagtttcagcttcagcatcagtccttccaatgaatattcagagttgatctcctttagaatggactggttcgtatctccttgcagtccaagggactctcaagagtcttctctaacaccacgttcaaaagcatcaattctttggcactcagctttctttatagtccaactctcacatccatacatgactactggaaaaaccatagccttgactaaacagacctttgttggcaaagtaatatctctgctttttaatatgctgtttagtttgggtcataactttccttccaaggagtcaagcgaaagtgaagtagctcagtcgtgtccgactctttgcgaccccatggactgtagcctaccagtctcctcagtccatggagttttacaggcagtgatactagagtgggttgccatttccttctccaaggagtaagcgtcttttaattttcttggctgcagtcaccatctgcactgattttggagccccagaaaagaaagtctgtcactgtttccactgtttccccatctgtttgccagtaattgatgggtccggatgccatgatctttgttttttgaatgttgagctttaagccaactttttcactctcctctttcactttcatcaagaggttttagttcttcttcactttctgccataagggtagtgtcatctgcatatctgaggttattgatatttctcccggcaatcttcattacagtttgtgcttcatcaagcccagcgtttctcatgaggtactctgcatataagttaagtaagcaaggcgacaatatacagccttgacatactgcttttcctatttggaaccagtctgttgttccatgtccagttctaactgttgcttcctgacctgcatagagatttctcaagaggcaggtcaggtggtctggtattcccatctctttcagaattttccacagtttattgtgatccatgcagtaaaggctttggcatattcaagaaagcagaaatagatgttttttctggaactctcttgctttttccatgatccagcggatgttggcagtttgatctctggttgcactgtgttttctcaaaccaacttgaacatctcgaagttcatgtttcatgtactgttgaaggctggcttggagaatttttagcattactttactagcgtgtgagatgagcacaattgtgtggtagtgtgagcattctttggcattgcctttctttgggattggcatgaaaactgaccttttccagtcctgtggccactgctgagttttccaaatgtgctggcatattgagtgcagcactttcacaccatcatctttcaggatttgaactagctcaactggaaatccatcacctccactagctttgtttgtagtgatgcttcctaaggcccacttgacttcacattccaggatgtctggctctaggtgagtgatcacatcatcatgattatctgggtcgtgaagatcttttttgtacagttcttctatgtattcttgccacctcttcttaatatcttctgcttctgttaggtccataccatttctgtcatttattgaggctatctttgcatgaaatgctcccttggcatctctcattttctttttctttttggtaaaattcttaatgtaaatttatttattttaattggagtgtaattacttttctttcccattctattgttttcttctatttgtactgatcattgaggaaggctttgttatctctccctgctcttctttggaattctgcattcagatgggtatgtcttcccttttctcctttgctttttgcttctcttcttttcacagctatttgtaaggcctcctcagacagcagctttgtgtttttgcatttctttttcttcgggatgatcttgatccctgtctcctgtacagtgtcctgaacctctgtccgtagttcatcaggcagtccatcagatctaatccctaaatctatttctcacttcctgtgtattatcacagggcatttgatttaggtcatacctgaatggtctagtgttaaattgtaatatggattagtgttaaattgtaatatccttctaattacataattatatgtatattgaaagatttataatattctgcaattagcgtcaccatttagtgtgtcctgttagtatagtttattatgtatttatagtactttaaagagtaaatacttgctttatgtggcaactttacctacattctgacctcctacttcagaaaatataaagtttatttggctttatctctgtggtagagaggaaatccattaagttctattaacacatttacttctaatgcactgaaggtacattgtaaattccatggtgttgtgactacatgttccggatattaacttattctgatttaaaaatactgtctgtcttatgcttttatttgtcttcttttcttagggctttggcaaatattaagaaatgggaaaagctaagtagttttgtttagtttctttagacttacgattcttctaaaacctgtctttttagcttctaggtttggagaaggaaatggcaacccactccagtattcttgcctggagaatcccatggatggaggagcctggtgggtccacggggtcgcaaagagttggacactactgagcaagttttgtttagtttttttagacttacgattcttcctctgaaacctgtctttttagcttctaagttagccagtcttaaattatttgagcagaagaatatcaatactgataacgtcccattgcgttctaaagttttaacaagttatttgctataaaacatgttctaatactcttcaagagtagagttctttgtagtttttattctccaggtatagatcgggcaagagtaggcagaatgcctgctgggcagcgtttacctgtgtgccgagcacgcctgtcttctagtcgttcatctgctgggtgcatctcagtctagggacacctgtggaagagtgcaggtggcaggcttcacgctttcttgctctccctcgagtcttgctgcctgttgagcccagtacggtggccccacagtgatagtcccggagtgtgggatgttcacacagaaggtgtggagaagcatctactgtttcctcacacaagccaaagtgacgggataggtttatgtttgcatcagttttctcattgcagggtggaagcagctatctctaggccctgtgatactcgtgcctgcgtcttagtcatctgatccgcgttccatcgctgtaaggcccctcgtcgcagcgccagttcacagtcccttgtagaaataaaagtgcgctgcggtgcgatgcactggccttcctcagtagcgttctcagtgcccgccatgcctgaattccgccattaaagtctgcactttgttgcatagagttttcgcttttttttaaattagtaatgttaagaaatcaccagtgcatgtataatatttctaagggtttagatgaatgtagaaataattgaagtgaagtcactcagtcgtgtccgactctttgcaaccccatggactgtagcctgccaggctccatccatgagattttccaggtgagaatactagagtgggttgccatttccttctccagaggatcttcccgacccagggatcgaacccaggtctcccacattgcaggctgacactttaccatctgagccaccagggaagcccctaaaataattctcatgacttaatttacctattttaggaagacttcctgcttgcagtaacattttacatgcatggaagaaaatagttggcaagtcaagaagtacagactaaaaaaaagaaaaaatcattgaatcttgagtgagagggagaaacccaatgatagtaaaagaatatgacaatagtgtaaatgaataaaaacaacttttgtatggactggaagagggtcctgagagtcccaagtgacagaccagaaagttacagctcagggcaagagtgtgggaaatagggactgaccgagtggcacgggtgtcacagctacagtgcacagcggacaggagggccagggtgggcgagaatgagatgagtgactaacgtctttgtataaaacattaattcttttaatgcacttccttccctgtacaataagttacgtcctaataaaaattaaagagcaagttgcatttggaagaacaggtcatcgtaactcattgacattaggccacataactgagtaatgtcttccttcagcgaaatacatcaaatgagatcaacaattatgactcataaacatgcctcgcaggcataaaacagcagggaattagcatgtgaggctgataaatatgcatgtgaataagctcccaaaggaataacgtgggtttgattgataggtttagaattggaacatatgtaagcccctttattcctcattctggtgtagctaagtaaagatgcgttttacttgttaaaaagtttcaataactttgtaaatcttaatgccacatctgttttttttgttgttgttgttgttgggttttttggtatgtcacttgtaagattaattgaattgtctacaggctggttggccctcacatccaatgaatggggagcctgtgagagaaaggctgtgcatctgcggctagagaggggaggggtctttgggaaatagctcttggcatcttacaaagtggtgtaggagcataggaagtttcttttggaagcagagatatgacgtagcacttgcctgtgatgcaaaaattgtgctccatatgagtattttggtcacctcatgtgaagagttgactcattggagaagactctgatgctgggagggattgggggcaggaggagaaggggacgactgaggatgagatgtctggatggcatcatggactcgatggacatgagtttgagtgaactccgggagttggtgatggacagggaggcctggcgtgctgcgattcatggggtcgcaaagagttggacacgactgagcgactgaactgaactgaactgatcctgtctttttgtgtttatttggtctttcctggtggctcagacggtaaagaatctgcctgcaatgtgaaagccctgggtttgattcctgggtcgggaagatcccctggaggagggcatggcaacccactccagtgttctagcctggggaattgcatggacagaggagcctggtgggctgcagtccacggggtcacaggaagagcttgtgagagagaggctgtgcatcaggctatgtctctccctagaggagggaggggtctttgagaaattgctctttttgtcttgaaaggtgatgtaggatcataggaggtttgttttggaaataaagatgtgacatagcagttgactttgacacaaaaatatacttcatatcatctcttttctgtttttttttttagcccttaacaatgaaatctctgtttcttcatgtcatcatacagttttgaagtcattaactaaaacacattttttaaataatttttttttcagttcttaatacctgtgccttttctgccccttctagatgggcattcataaactatagtggagcggtattagagagtatgcgcctgagtgccagccagatgtcagcaggcccctgggtgtgggctcaggcctcagctgctagatgactttggtgactttaggctcaagtcattccacgtaaatggaaggagaaatgtggctttggacttcctggcccagagccttaggcattattgctgtggggggttcaggttcactagcggaaggcatggtgggatcagacagtgcccatgtctgtaagagaagagttccgctgttttcctctcagaatagatttttcgaagtagaagcagcattcttgtaatatcgtgaaagtgctaaagtgtctgtggtttccaaagggatcatgtttttggtttggtgacacaggaaatgagttctgtattgcctgtgtccttcactctgcagagcagggttgttgatgtgaacattaggccttttgatttctgcagctgtgttctaggtgcttagaatacatcagtaaacaaagcaaagattcttgcccacatagagcttacattcttgcaaagggaggtaggaaataacaagcataataaagaattaggattctgtcttagaaagttaagaatggctttgaaaaaaaagaaatgttgcagttcgaagggactgatagtgtatatatgagccaggaggatacagaattaaatatcagggtagattttggggggaaatttgagctaagacttaaagaaaatgaaggaatgaaccatgtgaacagtgggcattgcaggctgaggaagtagccaagtgcagaagtgctaggttaggagctgccagtcacgttctgcaagtcaggtgggcagagaggtctgtgagttaacgcgagacttctcgtccctggccttcggcggatatagattccacgtggactgaatcgccatctgcggtggtctgactgctggattttttccttgtgaccttttgctctgggggacttcatttattctatattgtttgttcaaaatgtgtatttcccttctgacatcattttttcttgacttattccctgtcttcaccttaacacagatttagttcagcagaggcaaagttaggattttctgtagtgtgtaagagagctagaggagaaagtgaattgagttaggggatacagagttcagtctgagttttcatataagaaattttaagtctgaggtccacacactgtatgttgcagaaatcaattgggagttgtgctcacttcccttcttcctctcacctgcactcccaagcacagggaaacacataaaggcaggctcgggctttggtgggtggagggcttgtcctgggagctgggacgctccactggcatctagtgggtacgtgctgaaggtttgcagtgcaaacagccccacataatgaactgcctggcttcaaatgcccgcaggtgtaccagcgaggagtcctgaggcaaagatactaaggaccaggttagtccgcacaagaaagagagtagtgtacaactagggaaagtagttttctagaagagtaaggactagctgggtcaacaggaaaagcacgaggaatttcctagcctgatgagctgcgcactcggactgcgatggcgctgttgctgttgtggggaagcacagggctctagataaaggcacgtgctcaagtacgcacagtcaaaggcagagccccgcgggtactccgaagactccatgagttgcagtgctcaaataaatggacgcatagttgggtaatgagaagttcacactttggtgatctgatactggttaataaagccatcttcaggaatacgtgtgtttcattctaaatacacgcttggctggagtaggatttctaataattgcagatcgattgttttggttttagagttgctaacttatttttaaagacctcacagcacatgtttctatacaaattctctgggaaatgggaattttaatttccaagacaagtcacagaagtgaatatttgctatacaagtacattttctggcttagtttaggagtaaaactgtctcatgtactaaaatatctgatcactaagaatcaaaattgtacagaaagagcagaaataatattttgaaaaacttaaaaagagaatttaaaaaaagcagcagatctcttttctgctgtgtttacttgaggatcctcagcactagggctaaataattatttgtaatgaaataaatgaaacacactagacacacacagactcaggttcctggccaggacaaacgtttaacactggggtttgtatacttctcatcctttaatgagagaaaaaacatcatttctaagaaagcatttcatggtattaacttgaaattaatcaaactagctcttatgtcatcatcattgatcttaggtaaagttactgaataagtatattatttaagaaaatgtgttcagttcagtcactcactcgtgtctgactctgcgaccccatgaatcgcagcacatcaggcctccctgtccatcaccaactcccagagtttactgaaactcatgtccatcgagtcagtgacgccatccagccatctcatcctctgccgtccccttctcctcctgccccaatccctctcaacatcagagtcttttccaatgagtcaactcttcacatgaggtggccaaagtgctggagtctcagcttcagcatcagtccttccaatgagcacccaggactgatctcctgtaggatggactggttggacctccttgcagtccaagggactctcaagagtcttctccaacaccacagttcaagagcatcagttctttggtgctcagctttcttcacagtccaactctcacatccatacatgaccactggaaaaaccatagccctgactaaaatgtgtaagtattcataaagctttgctagtcattcatcattctgttgtcttaagtaactaactttttgttgtatctgtatatgtgccattttcatcttgaaagcgaaggatgagctaagaagggctagcagaagctagactctatctgagtagatttaggagtgagcatcctatttgataaaatcagaaaggcactgaaaaattgggtgaagcatcagacccagaataagaacagctgcctgaagctatcactatttttaaccagctatcctccaatataagataaaatgttaaaaaaaaaaagaatggtgaaacgtacttctagtgtgcattttatctgtagcaaagcagagtgtttgtaatcatctcattaagatttggggagaagagagatcctgatagaattttaaaaaggaagagtggctacatggaaaatgtgtcatacacattattagtaagtacttacttatgaatggtatagtatactttctttttagtagtattcctttatttcagaaaatacagaatattattgaggctttcaaaaatatacctgcaaaattcagccttcctcatcctgttttcattatcattgtttaaattcatctgtaataaagtttccagtcctggtatttttcagtaacttagttatttctgttgaagatggatacttacccttgagaataattaaaaaatgaaattaggggtataattcctaagaaataattataattctggagggaggacttatcacagtcaaatctaggaccctttatttctataggattatcttttccagtggtctcatttgatccaaggagagagagaggggaaaaaagaatccttaaagaaaatgttggctagcctatattttatgtcactatctgccaacccaaagtattctcttagccagtaaactgtctaaaacgccatcactgttttctggagttagtgaaaagaggaggcgctaagcaagtggaaaagagaagtggaaatgcagtgattagaaaaagactcgcctgcacggtgcctgaggtctctcctcacccttcactttactgcttaacaggggccgcggggtgatcagttcgggaacctgttgtactgatattctttatatttggtttattcatctgttttcccaactgaactatttgttctctgaaagcagaggctgtgtgtttcgtcttgaattccccgtggcacacagcagaagctcgctaaattgtgaccgaatgaactgactctgacgtgttagctggcaagcacttacggcgaggccctgggactccatcatgatcggagaagaacagcatgtgtttgcgtgggcacctgctctttcattgatgcggtctgtcgggatggtcataggcagagccaagtacactttcgagaagcagtccatgagagaaagtgctgtgttgataacctcagagttttgtgcccccaaagatgtctaggatctggaaataagacaaacgtaattagtcctctatatcaattgtgaggtatgcacaacatctgaattaaagtagcatcacgtcttaatggacaagaaggaatttgcttaaaaaaataattcttccaggaattgtcctgcctaattgactttgtttggcatttaccagctgtacactagaaagttgccgccgaaagcaaaggcttgaatttgggtgaatttgatattgagttctttctgctctcaatggttacacagtagaactcattgtttcttgaattagttttcactttctggtaatatgcctctcagatccgtttggaggacacagcatatcctcctgtttgccgtggcaggaggctgggtgtcagtgtgtgcgtgtctataaagtgcaagtgtgtgtgttggggggtagattggagtgtggagggaatcagtttcttttcctcaagatgaagaatgatttaaaagtgagcagccaagttttattccccacctgctttctttctctctgttgattcgtagatggaatcttttcagcctccccgcccccaccccccgcctcacagaaaggtacctccaagggttcttagctgcagccaagggagccttttcatgatctcctgtaacacccttaccttctgctggtggggtttctcaggaacactggagtgggttgccacttccttctccagaggatcttcccgaccgagggattgaacccgggtctcctgcactgcaggcggaccttcaccatccgagccaccagggaagccctgacctagagcaaggatggacagagtttttctctggaaatgaccagagaatgagtgtttcaggaatcacaggccatttggtctgcactatgtactcagcttagtccttgtcgtctgaaagcatccacggaaaacatgtgaagaatgggtatggtgcgttccaatgaagctagacttatgatgaccaaacattgactagcatattattttcacgtgtcacaaaatacccttcttttgatttaagtttttttgaaatactggaagcattccgcttgttgttgttcggggctgctgtgtctggctctctgcttccgcaggaactgcagcacgctagttccctgtgtcctccactgccgcccgcagtttgctcaagttcatggccattgagttggtgacagtatctaaccgtcgcatcccctgccaccgtcttctttgccttcagtctttctcagcgtcagggtcttttccactgagttggctgtttgcatcaggtggacagagtatggggtttctgcttcagcatcagtctttccagtgaatattcacagtggatctcctttagcgttgactggtttgatctccttgctgtccaagggactgtaaagagtctcctctagcaccacagtttgaaagcatcagttcatcagcactcatccttttttgatggtccaatactcatatccctacaagactcttggaatctgtcactgcttccactttttcccttctatttgccataagtgatgagactggatgctatgatcttagtctttttgaatgttgagttttaagctagctttttcactctcctctttcatcctcatcaagaggcacttccttgagaaagtgaagattcctgtttgctttctgccattagagtggtatcatctgcatatctgttgttactatttctcccagcaatcttgattcttatttatgaccaatccagcccagcgtttctcatgatgtactctgcatagaagttaaataagcagggtgacaatatacagctttgacacacccctttcccgattttgaaccagtctgttgttccatgtctggttctaacgttgcttcttcagttgcatacacgtttctcaggaggcaagtaatgtggtcttgtattcccatctctttaagaattttccatagtttgttatccacacggtcaaaggctttaacatagtcagtgaagcagaaacagatgtatttctgaaatttccttgctttctctatgatccagcagatgttggcaacttgatctctggtgcctttgccttttctaaaccctgcttgtgcatctggaagttctcagttcacatactgctgaagcctggcttgaaggattttgagcataaactactagcacgtgaatgatagctgaagtgaaatatctgttagaagcagtaaagagtggaatcaataaaggagaaattcaaagcatagttaggacaaattgaagaacagtatagaatgaggggcgatgaaaaccaaagtctcttacagaacatggagtgaggcagataggagagcacttcacagggacctttgagtctttggttgggagttcaggcttgaattagtcatcaggtaaaataacacacatacacacagagagcactgcaagccgctggcttacatcttaccttcacaaacatgattatttacatgaagattattctgatagctgtttctagaactattaatggagaaaatggatgtaccagatcttcagagaagtatgggctgagttataaagccagggaaagagtgtggtggtttttcaaatgaggaatggtgcaagcaggtttcaaatgctagggacagtaaatcagcatgactcagcaccttcccagtacagcgttaacagagtgaaaatgtctattcctgggatttgagagaagcccatggtaaatacatttttaaaaatacagttaacaaagcctgttggaaataaagggagactttcaaccagactgagctgtgtgtatgtgtgtgtgcgtgcacacatgcacaccctcatgcgtgtgtacatacgtgtaaagaaaccatggacagttatctaactgaaaatgaacttaaactgtgcttgcattcttcctttggtattaacatgcctcagagtaatacatgccataaagtgcatatacttctgattatacagccttgtcctgtactgtgcttgaatcaacctactgtggaatgttattttctgtgctttatttgcaagttaacattttaataattatcataaatagttatctgatttgcatattctggttcataatccaactgttctgtggatcaaccacagttctctcattattcatgccaaggcttctatattagtctgaataatctatcctagactgtatttctgtttccagttctcagagctttttataactcaaagttataagactgaatcatacatgtgctagtacagtaatctctttgactgactcttggatggaagtgacttttattattatatgactaccaaggtttctgtgtagtgctgttttcttttacttagatttcatagccgtatgagttagatattcaggtagtattgcagcagtcccttatcttttatctttctagggtgtataagctaaatgaaaaagtaggacatatgcactgagaactaaaaaaaactgaaaatgttacttttcaagactcagattatcaatctgtataaaacagatcacatagtagaaatggtcatattagagaagcagagtgactgggtgactggattaggaatttggctgtaatgtaactaatgaacctggaatacctagacaataaattcagttttgacaaggaaggtcagctggaagtgcaaattgataagcataatgatgaccatgtgagcattagctgcagagggagcgattgtttcagacaatcatcatgttctctgtagttatctctagagatgtggaaggacgcatgtatcaagttagaaaactttgaagccgttaaaattagagtctgatctccgtttataaaactgtggtatttccttatcagctaatgttctgaaaccttgacttctgaggaactcttacgaatagagacagtagtggttagaatctcatacatatctgattctcctcacagatttctttttttggctccacatagaacacattcattaattggcttatatacacttaatttcttatatgcacagaattggcttgaagtatctgtctccagtaaaacctgatgtactgaaaatgtagcccctagggtttaagacagtgcttaccaccagagtggtaaaggtacaaatatgaatacaccacattccatcatggttgccctaaattccatgtagtatagtcccatcatataatctgatataatcagtgtaccctactaggtgtttttatcctgtcatggtctgctataaatttgtagggttacttttgcaaggaaaactctatttttcgaaggcattgagccttcagttcatctgtgtcttacccataaatagcaatcctgagtcacgttcccatgccttaacattctccttaagcaaaggtaatgtgactttcagtgcagacttaagaggtaaagtggttatcttcttcatatgcatattctctatagcaccgcacaatgtcttttaaattgtttggattaaactgcagtgtttatttggtgctagctacacataaatataatcatgaacttctgtgtgcttagtcgctcagttgatccaactctttgtgaccccatggacaagcctgccatgttcccctgtccttggggattctccaggcaggaatactggagtcagttgccaagccctcctccatggggcctttccaagccagagatcaaacccaggtttcccatgctgcaggtgaattctttaccatctgagccaccagggaggtctgagaagactggagttaatagcctatgccttctcggggaatttcctgacccaggaattgaactggggtctcctgcattgaagggggattctttaccagctgagctaccagggaagcccagtcatgaccttaaggatagaaatttggtcagcttggcttggtgagacatttgatatggcagacattagttagctgcttcactcagttcagttcagttcagtcgctcagtcgtgtccgactctttgcgaccccatgaattgcagcacgccaggcctccctgtccatcaccatctcccggagttaacccaaactgatgtgcatcaagtcgatgatactatccagccatctcatcctctgttgtccccttctcctcctgcccccaatccctcccagcatcagagtcttttccaatgagtcaactcttcgcatgaggtggccaaagtactggagtttcagctttagcattactccttcaaagaacacccaagactgatctccttcagcatggactggttggacctccttgcagtccaagggactctcaagagtcttctccaacaccatagttcaaaagcatcaattcttcagcgctcagctatcttcacagtccagctctcacatccatacatgaccacaggaaaaaccatacccttgactagacggacctttgttggcaaagtactgtctctgcttttgaatatgctatctaggttggtcataactttccttccaaggactaagtgtcttttaatttcatggctgcagtcacttatctgcagtgattttggagcccaaaaaaataaagtctgacactgtttccactgtttccccatctatttcccatgaggtggtgggaccggatgccgtgatctttgttttctgaatgttgagatttaagccaactttttcgctctcctctttcactttcatcaagaggctttttagttcctcttcactgtctgccataagggtgatgtcatctacatatctgaagttaatgatatttctcccagcaatcttgattccagcttatgcttcggattcctgccaagcatttctcatgatgtactctgcataaagttaaataagtagggtgacaatatatagccttgatgtactccttttcctatttggaaccagtctgttgttccatgtccagttctaactgttgcttcctgacctgcatacaggtttctcaagaggcaggtcaggtggtctggtattcccatctctttcagaattttccacagtttactgtgatcctcacagtcaaaggctttggcatagtcaataaagcagaaatagatgtttttctggaactctcttgctttttcaaatgatccagtggatgttggcaacttgatctctggttcctctgccttttctaaaaccaacttgaacatctggaagttcactgtactggttcctgtactgctgaagcctggcttggagaattttgagtatgactttactagcatgtgagatgagtgcaattgtgcgttagtttgagcattctttggcattgcctttctttgggattggcatgaaaactgaccttttccagtcctgtggccactgctgagttttccaaatttgctggcgtattgagtgtggcactttcacagcatcatcttccaggatttgagatagctcaactggaattccatcacctccactagctttgttcgtagtgatggtttctaaggcccacttgacttcactttccaagatgtcaggctgtagatgagtgagtgatcacaccattgttattttctgggtcatgaagatcttttttgtacagttcttctgtgtattcttaccacctcttcttaatctcttctgcttctgttaggtccataccatttctgtcctttattgagcccgtctttgcatgaagtattcccttggtatctctaattttcttgaagagatctctagtctttcccattctgttgttttcctctatttccttgtattgatcgctgaagaaggctttcttatctctccttgctattctttgtaactctgcattcagatgcttatatctttccttttctccgttgctttttgcttctcttcttttcacagctatttgtaaggcctccccagacagccattttacttttttgcatgtcttttccatggcgatggtcttgatccctgtctcctgtacgatgtcataaacctcattctatagttcatcaggcactctatctatcagatctaggcccttaaatctatttctcacttatactgtataatcataaggaatttgatttaggtcatacctgaacagtctagtggttttccctactttcttcaatttaagtctgaatttggcaataaggagttcatgatctgagccacagtcagctcctggtcttgtttttgttgactgtatagagcttctccatctttgtctgcaaagaatataatcaatctgatttcggtgttgaccatctggagatgtccatgtgtagagtcttctcttgtgttgttggaagagggtgtttgctatgaccagtgtgttctcttggcaaaactctgttagcctttggcctgcttcattctgcattccaaggccaaatttgcctgtaaccccaggtgtttcttgacttcctacttctgcattctagtcccctataatgaaaaggacatcttttggggttgttaattctaaaagaacttcagccaaatgaaggcatcagctctgacccattgcctgcaatgtagtaagcctcatgtgggtatttgatgaatatgtgaacttaaatggaaagttatcatggtaagctttgaaaatcataacatagaattaaatagtaatagtttgcatgctttctgttttctgaccaggattgtagaaagctggaaaaaatcacttctaaacttagaacagtaaaaagctggactgatggcagggtcactgcttttcttgaacccactgagtactgaagttggaagggaatgaactggtacagaatctagagggagacaaatacctttctcttgcagatggaagcaagataaagtgtcaacttggcaagatgcagtggacacctgtagaaagagttaagctaaaatgattgttgagttgtggaggtcaaggttgtgtgatgttgagaaaaattgaagctgggggggtgggtggggtgcacaaaaatagaactctgcactctcttgtgtagatttttcttcaagaatcccatcaggcagtcaaagaatatttccccttgtggtgaagaactgcagtaggaaattcagcagcctaatgagacgcactgaagctccaatagtttggccacctgatgagaaaaactaactcatttgaaaagaccctgatgctgggaaagattgaaggcgggaggagaaggggacgacagaggatgagatggctggatgtcatcaccgactcaatggacatgggtttgggtgaactctgggagttggtgatggacagggaagcctggtgtgctgcagtccatggggttccaaagagtcggacatgactgagcgcctgaactgaaccgaactgaataagaggcacagtaaactctagctggactcttctccctcttttctcttatggagtaaaaccatattctgttggggtacctgcaataattactgtttccttgaggagcagttggaatccctttgcagcctgggatttagagttggggaaaaaataaacctcagcctgagaggaagcttaggagcaagtattggaaccaaaactataccaggtgaggggagggtccctgagagtgcacagggaactcatctggctgcacagtggttagggctgcgctgccactgcagcggcctgggtttggtccctggtcagggaagttccacattctgtgcagtgcaggcaagaagcaaaacaaaacagaagtacacactgccctgagagctagagacactgtgctcacttgagactaaagacttaatcagaagatcagagaatactctgccccattgttcactccctgcttccaggataacacctgtcaagtaataagtaacttggaagaggcagacgtttttggatcatgaggaattaaggctgagaatggagcaagtgtgagaatgaaaaaaaaatctttagcaacctaaattcgccatctctaacacaatgtgctctgtataagagttttcagcctttgctctcaagtataaccacagcaactacaaagtttatacctagctcagctcctaattaggttagcacaaacccctgtgcaaaacttatagtagaaggaagtgtgtgctcatttctaagcataaaaactactttaatctctactactgataagcttgataaccggtgaacataagaacttcaacaaaaaaataaaaagagtttgaagagggatatgggaccccctagccccccaaaatataccattcaaggcacaaagggctaaacagacacaactattacataggcttggcatagtctcataaggaaatttaaataactgaattatatgttaaaggacttactggaaaagcctgtcagcaggcaaattcagatagttaatttcagcagagatgaaaattttagcaaggaatgcaatttaaagttcaagacatataaaaaaaggcaacagagatagagaatgtgtataacaagtgtctaaatctggtagattgcctgaagaactgcggatggaggttcgtgacattgtaaaggagacagggattaagaccatccccatgggaaaaaaaagcaaaatggctgtctgaggaggccttacaaatagctgtgaaaagaagagaagagaaaagcaagggagaaaagggaagatataagcatctgaatgcagagttccaaataatagcaagaagagataagaaagccttcgttgttgatcaatgcaagaaagtagaggaaaagaacagaatgggaaagactagggatctatttaagaaagttagagacaccaagggaacatttcatgcaaagatgggctcgataaaggacagaaatggtctggacctaacagaagcagaagatattaagaagaggtggcaggaatacacagaagaactgtacaaaaaagatgttcacaacccagataatcacgatggtgtgatcactcatctagagccagatatcctggaatgtgaagttaagtgggccttagaaagcatcactatgaacaaagctagtggaggtgatggaattccagttgagctatttcaaatcctggaagatgatgctgtgaaagtgctgcactcaatatgccagcaaatttggaaaactcagcagtggccacaggactggaaaagatcagttttcactccagtccccagagaaaggcaatgccaaagaatgctcaaactactgcacagttggactcatctcacacgctagtaaagtaatgctcaaaattctccaagccaggcttcagcagtatgtgaactgtgaacttccagatgttcaaactggttttagaaaaggcagaggaaccagagatcaaactgccaacatctgctggatcatggaaaaagcaagagagtttcagaaaaacatctatttctgcattattgactatgccaaagcctttgactgtgtggatcacaataaactgtggaaaattctgaaagagatgggaataccagaccacctaacctgcctcttgaggaacctgtatggaggacaggaagcaacagttagaactggacatggaaggacagactggttccaaataggaaaaggagtacgtcaaggctatatattgtcaccctgcttatttgacttctatgcagagtacgtcatgagaaatgctgggctggaagaagcacaagctggaatcaagattgccgggagaaatatcaatcacctcagatatgaaaatgacaccacccttatggcagaaagtgaagaggaactaaaaagcctcttgatgaaagtgaaagaggagagtgaaaaagttggcttaaatctcaacattcagaaaacgaagattatggcatccagtcccatcacttcatgggaaatagatggggaaacagtggaaacagtgacagactttattttttgtgcctccaagatcactgcagatggtgattgcagccatgaaattaaaagacacttagtccttggaaggaaagttatgaccaacctcgaaagcatattcaaaagcagagacgttactttggcaacagaggtccatctagtcaaggctatggtttttcctgtggtcatgtatggatgtgaaagttggagtatgaattaagctgtgcactgaagaattgatgcttttgaactgtggtgttgcagaagactcttgagagtgccttggactgcaaggagatcaaccagtccatcctaaaggaaagcagtcctgcgtgttcattggaaggactgatgttgaagctgaaactccaatactttggccacctcatgcgaagagttgactcattggaaaagactctgatgctgggagggattgagggcaggaggagaaggggacgacagaaaatgagatgcctggatgccatcaccaattcgatggagatgagtttgagtgaactctgggagttggtggtggacagggaggtctggcatgctgtgattcatggggtcgcaaagagttggacacgactgagcgattgaactgaagtgagtaacaagggtcataaacagagttgacaaagaaaaaataagaatcaatgaactataaaatatgtcagtcagagttattcaaattgaaacatgaagagaaacacaagtaaaacactcatgaagcaagagacgaagtcatgtgggacatgtgggtgggagcagttcagaagaaatgtttaaggaagtaatggtcgattatttctccaaattaatgacaggcactaaactacagatccaaaaatctgggagcacaaaccattgtaaatatgagaaaacaaataaaaatttccaaacatagttgtatgatattcaaactgatagaaacagaagacttataattaatggcaaccagaaaacaattagtgtagccataatagaaagctaatacgaaattcttacagatgaaagaagtaaataagaattagagcaaatttcttatcaaactcatgcaagctaaagaccgtggagtgacgccttttacgtgctaaaaggacaagcacaacttctcaaactagatttctataccaaatgaaagatgttctgaaataaatgaagaagatagaaagactcttccagatgagcaaaatccattggcatttattagcagctcaactgtataggagatgcgaaaggagagtggccagaagggacagacagggcaaaggcactgggatccgtgccaagaggagaaagagcgttgggagcggagtaagcacgcgcgagattattttttctccttttcattgccctaaaatctgaatgtctaaactagaaacagtagcagtgtgttctgtgtttacagagtacgtaagattgataggcctgatggcatagcacaaagggtaagagggaggaatcagagttactgcagtaaggtcgtggcatcacacatggcatcgtggtgctgtttgaaacagctctgattgattacatatgtagtacaggcctagagtagggatcaggagacaactttcttaaaggacagtgtcatatatatatattttttaattcataaagcgttatgatctttctttcaaccttatagtgtgaaagcaaccttagtgcagaaacaaaccggcatggttctgtttcagtgcaatttaacctgcagagacatttgactgtgccaggccacggtttgtcaactcttgctctggaacattgattaaaaaatgtaatacagaagaataaataataattcggtagagggtatcaaatggaatcatagcatatcctcaacttaaagtataaaatgagagaaaaagaaaggatagatggaataagaacagatacaaaacagtagttgggtggtatatcttattttatccatatcagtaatcacattaatatgtatactgtaaacacaccagttaaaaggcaggcgttgtcagaaaaggttttaaaaaacaagaagtaattatatgctatccacaagatactcaactttaaatcaaaaagatgtggcaggctgaataatgcctccacccaaatattttcattctctgtctgctagaacctgtgaatatggtgacttacatggcaggaagaactttgcaaatagtcacatgttgaggaactgaattctctgtgaacacccgaatgagcaaggaaatattttttcccaggaacttccagtaaggtacacagcccagctcacacctcaattttagcccagtgaggacctatattagaattctgacctacagatctgtaagataatgcatttgtgttgttttaatccactaaacttctgctaatttattatagaaataatatagaaaactaatacaaatgaaataggaatatctaaagtaaaagactgcaaggagatccaagcagtccctcttaaaggaaatcagtcctgaatactcattggaaggactgatgctgaagctgaagctcaagtactttggccacatgatgcgaacaagtgactcattggaaaagaccctgatgctgggaaagatcaagacaggatgagaaggggacaaaagaggattagttggttggatggcatcaccgactcagtggactgagtttgggtgggctcggggagtcggtgatgaacagggaagcctggtgtgctgctgtccttggggttgcagtgagttggacacgacgaaatgcctgaactgaactgaaagtaaaagaatgcagaaagttataccttgaaaacacagagctacagtagctattaatgtcagactaagcagatatcagaatgaggattattattagtaataaaaagggtcattatatgtgattttgtccggcttatgtcactgaatgttttcgggttccaaccatgttagtgttgttcagttgctcagttgtgtctgactctgtgtgacctcatggactgcagtatgccaggcctccctgtctttcactatatcccggagctttctcaaactcatgtccattgagtcggtgatgccatccaaccatctcatcctctgtcatccccttctcctgtcttcaatctttcctagcatcaaggtcctttccaatgagtcagttctttgcatcaggtggccaaaatattggagtttcagcttcagcatcagtccttccaatgagtattcagggttgacctcctttaggattgactggtttcgtttccttgcagtgcaagggactgtcagagtctgttcccacaccacagttcagaagcatcagttctttggcactcattgttctttatgattcaactctcacatctgtacatgaccactggaaaaaccgtagctttgactagagggaattttgtcagcaaagtgatgtctctgctttttaatatgctgtttagatttgtcattgctttgtttttgaagagcaagtgtattttaatttcatcgctgtagttaccatctgcagtgattttggagcccaagaaaatatagtctgtcactgtttgcatttttttccccatctttacacgaagtgatgggactgaatactattatctcagtttttaaatgttgagctttaagccaacttttccactctcctctttcactttcatcaagaggctttttagttcctctttactttctgccataagggtggtgtcagctgcatatctgaggttattgatatttctcctggcagtcttgattccagcttgtgcttcctccagcccagtgcagtgacattggacagccttaatacactcctttgccaattttgaatcattccgttgtttatgtctggttctaactgactgcagccatgaaattaaaagacgcttactccttggtagaaaagttatgaccaacctagatagcatattgaaaagcagagacattattttgccaacaaaggtccgtctagtcaaggctatggtttttccagtggtcatgtatggacgtgagagttggactgttaagaaagctgagtgccaaagaattgatgcttttgaactatggtgttggagaagactcctgagagtcccttggactgcaaagagatccaaccagtccattctaaaggaggtcagtcctgggtgttctttggaaggaatgatgctaaagctgaaactccagtactttggccacctcatgtgaagagttgactcattgaaaaagactctgatgctgggagggattgggggcaggaggagaaggggacgacagaggatgagatggctggatggcatcaccgactcaatggacgtgagtttgagtgaactccgggagttggtggtggacagcgaggcctggtgtgctgcgattcatggggttgcaaagagtcggacatgactgagcgactgaactgaactgaactgaactgttgcttcttgacctgtgtacaggtttatgaagaggcaggtaagctggtctgatagtctcctctctttaataatttcccacagcttattgtgatccacacaatcaaaggctttagtgtaatcaatgaagcagaagtagaaagtagcttataaaaagaatcttattaataaccaaagtaagataattacatatagaaataaaatgttaggaacacatttatttattattcaccacagaaataatttcaaataatttcaaaggatttcagttttcagatcttcatttggactaccttagaattaagtatccaggtgtctctcttttatcagattatcctgtgatctgttggctcgcttccttcccctccccattattcagtctttacatagcagctaaagtgatgatttccaaaggtggggtggagagtccttttgatcctttgaaacgtgatggcgttttctctttgggcctctaaagtcgcgctgcctcccctcctccctgcgttctctggctcctcctcttttggtcggggactgttcctgtctcaagtgccattgtacagaagattgtataactttattctttgacatttttgaagttgtcagggtacattgctttgactatccctctctcctcaactgccaaaaacccccagatgtcaggagtgggttttgagcttcttgctttccaccatatcactagtgctaaaatgcaataggagcttaacaggtgatcacagcaagaacttttccattaggaaagctactctgtaatccaggtgcacaactagaagtttgaattactacataaacacatgtattgactaggcccattagccatttgtctagataactatttggttggataaaatgatcagtaaataactgctttgaataatgtatttaatactctacaagcatagttgaatttggtaagttatacgtttcttagaaaatttaaaggagttgccattttaaaaatattcctggttattatgtaaggttaagaaattatctcccctaataaatagactttatcataaaataataaacaaatcagtttgaatatttagaattcttctttaaagtgagattttagtacaattatttaatattaaaataaaataacttatgaaatagaacagtttgatggatcatttggccttcccacgtggcaccggtggttgataaaagaccctcctgccagtgcgggagatgtcagagacgagagttcaacctccaggtcgggaggatcccctgggggagggcccagcaaccctctccagtatcctgcctggtgaaccccacgccgggaggagcccggcgggccacaagccatgctgtcccagagtaggacacaacggaagagactcagcccacatgcgtgtgccagttaaaatggttttgaattttttaccttgaaggaaatggtagacacttgaaaatttttgataatgtgtttgaagattgagatgactagatttaatgtgatttcgtttagtaaattgttttagaagctaaagataggtgtgagcatgtttgccctgggttctctgtctgagcttcgggactttgtagctgaggtgcccgttaggctttctacggggacgtttggtataagaacgtgttcagttctctgtcatttaaaagatatattaatgatttaccctagttcgtggatggtaatttatatccttcaaagagttccagtttggttttttatacaaaaagggagatatttaacattaagtatcttatgttaagtacatgaggttaatggtgtctttacattttatgaggtcatgtcctcttgatgtcagttttaaaggttctagcactgattgtaatcagtagtgaaaatgagaattgctgaaagaaatttgttttgtataaaaggatatttcattttttatacattgaagagaagaatatttaatatacatattttatagttagtatttgaaagatttaagtgaaatagaacttcaatagcaaatgtactgtagcaaaggatatgtaaatgacttttgctgtattatttacgcactagacaggtaatttgatttcagctttagaattccttcagtgtcaattagatcatctttgaaaatctactgtctttattttttaaaaataaaataagtattttattaaaacttgtgttaggactagtagcaaatctaaaaatgttggtcagaatttaaactaagtcattatttgtatttttgttaaggaaaaatgtagcaaagggcaaagtgtaaagtaatcatctttggccttgatagtttttgcacattataaacttggaagaatattttcaagcattctttgtcaacacatttacttttaaggaagctcttttttaaatctatgttgttggttatctgcttactataaatgtattttgtaattttctaaattatagcattggcactaattatgtaactcttctgtaggaagatgcttttgaagcccaggtggtccacaggaggaccacgtaggcctatagcagtgttctgctgggcatttccactgtgcaccctccccagtaatcacttcatggaactaagaacacagtttaatgtgcagaattggcatacctcaaagcagtcctctgctactgctagaaaacgtggtcagatttgtgccttattgatagctgttagtaaatgaagatgtgtgagacgcagtccctatttgagatacattaaattgccttctgtaagagattattaccttagcagtgtagacgtttatttttcagtaggaaggacttttgtatcatcatagtaatctaggaaagctttgaaaataaagggtgttggatcccactcagagttctctcaggctcgcccactttcccagtcttctctcctgcagacacaccatagatgcacacggacgcataccctaaaaacctgtcccggggatggggattatcagcctgtcatgagcttggtctgacctggccctttccttctgtactgtagatgtgaatgataggacccaaagaggttaactctgcatcggaattctcttcacttgattgattcctggtctactttgtttttttttctgaaacattaagcagctctaagtccatagatgggaaaacattggcaacagtgtcagactttattttttgggctccaaaatcactgcagatggtgattgcagccattaaattaaaagatgcttactccttggaaggaaagttatgaccaacctagatagcatattcaaaagcagagacattactttgccaacaaaggtccgtccagtcaaggctatggtttttccagtggtcatgtatggatgtgagagttggattgtaaagaaagctgagtgctgatgcttttgaactgtggtgctggagaatactcttgagaatcccttggactgcaaggagatccaacgagtccattctaaaggagatcagccctcagtgttctttggaaggaatgatgctaaagctgaaactccagtactttggacacctcatgtgaagagctgactctttgaaaaagactctgatgctgggagggattgggggcaggaagagaaggggacgacagaggatgagatggctggatggcttcaccacctcaacggatgtgagtttgagtgaactccgggagttggtgatggacagggaggcctggtgtgctgcgattcatggggtcgcaaagagtcagacatgactgagcaactgagctgaactgaagtccttagaatgcctgaagagacaacaatatgcctggaaatgacaatgataagaaataaagatactagcatttgagtgttattacatgttaatttagaaagaaaaacaccaatatagtatactaacacatatatatggaatttagaaagatggcaatgatgaccctgtatgcaggacggcaaaaaagacacagatgtgtatagcagacttttggactcagagggagagggagagggtgagatgatttgggagaatggcattgaaacatgtataatatcatgtaagaatcgaattgccagtctatgtccgatgcaggatacggcacgcttggggctggtacacggggatgacccagagagatgttgtggggaggggggttcgtgtttgggaacgcatgtacacccgtggtggattcataaaaaaaaaaaataaataaataaataaattctgtagttatccttttgattctctttagacttaggctttgtttcagttctgtctcagtgtataatgaattcttcttcaagcttattttattctgatacatgtgtagtattgtatgaggttccttgatggctcagtggtaaagaacttgcttgccgatgtaggagcctcaggtttgatccctgcatcaggaagagcccctggagaaggaaacggcaacccactccagtgttcttgcctaggaaatcccacggacagaggagcctgatgggctgtatagtccatggggtcacaaagagttagacacaatttagcaactaaaggacagcagcagtaatactgtccactacactgtactgtgtgtggtagctccggtttatccctagattcaccagagttttagttatctatctgcattttatcagcaccaagaaatatttttatgtgttcagctcatgcattgagctctcattttacttaattttactgtttctccactctcagtgtttggtgttatcatcaggaaggatattaaaagaatagtacaaatgttgcatagttgtataattcatagaataaacttttgttaattataaattttatcagaaatgatggtttttaattactaagaagaagaataatttccagttatttaaattatgaataagtttattctctttatatagaacgaatagacttctactttgactccttcgctggatacagtatcttaagcatattcactgataaaagcgttcataaaaagatcatgctcacggaggttctaggttgtgctgcatgctgtactcagctctttgcttgcgctcctctaatcgtcatcaccacattttgtggtgtaaactgttatcatcttcattttgtagatgaggaaactgaaatactgaagttaagttagagggaaaataaatggagtatgtcctcaggtctttcctgccagagctttagcttttagtcgtggtgtttcaatacctctccttcaaaatttcttcaaattgaatgtgacagtttgattttaccaattcattattttcccccccagaagttgctttaaagtttaatcagaaatcaccatcaccttttttgtaaaaacaatttttacaaccgctgtgttcatacagatcctacctgcatatttatttctttgtctttctagctttagacactcacatttgcatttattatacttaagaattttccagtgtttttagtaattgacttctacccttattcttttgtagttagacaaggtattttgtgtagattcatgccggggtccagccccggtggatccagggtgattcgaaggtggggacggcatcggcgtccttggaaaaatacatatttaattacagatatagagagacattagaaacggatagtgtagtaggaaaattagtggacaaaagaagctgaataacttggtttacgtggaatagcatccatgctccagatgggaattcagccagaaaaacggggagcaagaaagaaatgacatggggaaatcagtctttctgcaaactgatccaatttctttattttggggtttgcttatataccttttgttacacatagggatgaatacagagtcacgcgggggtcagcagtcctgaccttcatcaaaatcaggtgcttcacacaaaaaggtcttaggggttttacatcatcttctggccatgagacctgctgacattttatgatcctttctttctgataaccaaaaaacttattttttccaagggtgttttttcttaaaccaggcaccaccctccaaataaagttacattcctatagggtgagggtgtagtgagttacaatcaagaaaggaatttatttaacccaaggttaacatgattaatcttaaaggttaatacttatttctcctatatgcttaaaggttaatacttatttctcctatatgctagttatattcattataagggcagggaacatggagatttagcagcaaacatcaacccaacaaatgaaaatcctttcaccaatgttccccttaagatctatttagtcttaagatttgctatgaccagtgcattttcttggcaaaactctattagtctttgccctgcttcattccgcattccaaggccaaatttgccaaacactccaggtgtttcttgacttcctacttttgcattccagtcccctataatgaaaaggacatctttttcaggtgttagttataaaacatcttgttggtcttcataaaaccgttcaacttcagtttctttagcattactggttggggcatagacttggataactgtgatattgaatggtttgccttaagatagtgataaagttacatttttacacagcaaggacacaatgatttataacaaagtacactgatctattacaaaagagaaaatgcattaactcaaaaagtctagtattgctaaccttaaaaaatactatatttccttttctatattccaaatacattgattaatatattcccaggtgcctaaggatatggagccctggtggcagtccttgactcaacaatgagagaagtcctatgctaatcggttcagttcagttcagtcgctcagtcgtgtccgactctttgcgaccccatgaatcgcagcacgccaggcctccctgtccatcaccagctcccggagttcactcagactcaacgtccatcgagtctgtgatgccatccagccatctcatcctctgtcgtccccttctcctcctgcccccaatccctcccagcatcagagacttgtccagtgagtcaactcttcgcatgaggtggccaaagtactggagcttcagctttagcatcattccttccaaagaaatcccagggttgatctccttcagaatggactggttggatctccttgcaatccaagggactctcaggagtcttctccaacaccacagttcaaaagcatcaattcttcggcactcagccttcttcacagtccaactctcacatccatacatgaccacaggaaaaactatagccttgactagatggaccttagtcggcaaagtaatgtctctgcttttgaatatgctatctaggttggtcataacttttcttccaaggagtaagcgtcttttaatttcatggctgcagtcaccatctgcagtgattttggagcccccccaaaataaagtctgacactgtttccactgtttccccatctatttcccatgaagtgatgggaccagatgccatgatcttcgtttcctgaatgttgagctttgagccaacttttccactctcctctttcactttcatcaagaggctttttagctcctcttcactttctgccataagggtggtgtcatctgcatatctgaggtgattgatatttctcctggcaatcttgattccagcttgtgtttcttccagtccagcgttcctcatgatgtattctgtatataagttaaataagcagggtgacaatatacaggcttgacgcactccttttcctatttggaaccagtctgttgttccatgtccagttctaactgttgcttcctgacctgcatacagatttctcaagaggcaggttaggtggtctggtattcccatctctttcagaattttccacagttgattgtgatccacacagtcaaaggctttggcatagtcaataaagcagtaatagatgtttttctggaactctcttgctttttccatgatccagcagatgttggcaatttgatctctggttcctctgcgttttctaaaaccagcttgaacatcagggagttcacggttcacgtattgctgaagtctggcttggagaattttgagcattactttactagcatgtgagatgagtgcaattgtgtcgtagtttgagcattctttggcattgcctttctttgggattggaatgaaaactgaccttttccagtcctgtgtccactgctgagttttccaaacttgctggcatattgagtgcagcactttcacagaatcatccctcaggacttgaaacagcatatgctaatcaagactttcagtatactccaaaactccctgtgctgttcatggttgagaggtaataaacaatcactttgtgtgtgtagtggcaggaggatggataatcctgtcacacaagctaatctgtcagcagagaggtttgacctgagacatccttgtcccacccagggcagggaattagcagcagttattggcacaacaaatgaaagaaccctttaccaatataattcgtaaccaacccactaaactgacaatttcccaaaagaatttgcctttagtaagtctaaaacatctcgtgcctctcagatttggaggctgtaaacaatcacatgtggccggacgaatgtatacaggcgggctagataaccttcagaggagtccgtaagctgaaacactcttgtcacgcccaggaatttttattgccttggagctgcatgtttactcctcctccgagagaaacggttatgggggagagcccccccgtaaagtcagaggggtaggtgagagcataaaacagagtctggttttggggtagatgctccagaacagggagtttcctgaggcttgatcacgcctttgcatgtgccaagcctccttcctcatgacctttgccatgggcggagttcctcattctggctccgggcagattcagtcttcctaactgtactgaagcttgttttgtgacttaagttacggtgcttcgtggacagtgctcgagcgcactcgaggggaccgtgtcttctgtggctggctggagggtttatgtgcgtgtgaggtctacctggtttacagtcttgctcaagtcctgcagttccttatgtttcctggatctcctgcctagatgctatgtcactgttactgtaggactgtctctccctgagctctgtcagtgttcgcttccgtatgtccatgttctgtggtttggtgcagacgtgctgtaactgttgtatctttcatggtttgatcctttcatcaatatataatgtcctttgtcaaacagttttcttgtctgttggagcagtctcttttgtctaatattagtatagcgaagtatctctctctgtctcactcttctttttgggttatttttacatggaatatcttttctatccttttactttggttcttaaatgagtctcttgtagacaacatatagttacattgtggtttttctgaatgcatatttttctaatctctgcttttgaatgaaactttaatccgtttacatttaaggtaactgctggtaaaaagagtgttgccattttcctgttatttttctgtacgttttatgtcttctttccgctcatttgctccactactgctttttcttgtgtttggttgtttcttttcgttttgttttgtagtgaccattgtttgttccctttctcttcctgttgtgtaattttttatatacattctttgttactgtcatagggatcacacttaaatcctgaatttttaaaaatcaacttcaaattgataactctatagcatacaagatatgtgctgctatactgccctgaccttttccctttttatgttgtgtgctaagttatttttatacattgttgctcagttgtatcaatttataatcatttttatccatttatttttttatatcctgtaggaaacacagtatgaaatctttaatcttaaagacaatgatactggctttatatttgctcacatgtttacctttaccagagatctttatcttttgttacagcttggagttagtttggtattctttcctttcaacttggaagtttgccattagcttttcttttagtgtatgtctactctcagcttttgtgtttctagaaatgtcttacagtcttctcattcattttcaaatgagtattttggtagatacaaaattcctgatctacagccgttttttcaagagcagtttaaagtctgtatagatcccgccactcttctggctgcatgatttctggtgagagattaactgctgatcttactgaggattctgtttcttccttcaagagtctctgcttgttttgtcttagaatagtttgctgatattgtgtcttgatctgagtctctgagttaatcctccctgaaatttaatggaatttcttggatttgtagatctctgctttcatcagatttggaaagcttttcaccgtatttcctcaaatactctttctgcctctttctctcctccctgtgagcttcccgtagtgcatttgatgatgtgcttgatggtgttatacaaatctcttgggttatggtcgtctttcttcactctgtttttaaatttttgctcctcaaactccctaatttcaattgtcctatgttcaaatttgttatttctgtcttctgcctgctcacacctgtggttgagcccctctagtgaatttttcaactgaattgttgtgtttttcagcttcataaattctatttttttataatttctacctctgtgttgatatcattttgttgatttgctacatagttttttcccttttttttagtcttttttttttttttcctctttgaacatctttaagacagttgtttcaaaatctttgtctagtaaatccagtaatttctcagggatagtttccattagtttattttcattacttagatgagccatatttcttgttccttagtatgcttcatgattttgttgttgttgacaatgtgatatttgtacattgttattcaaaaatcaggttctccagaaatcagattctttctcctgggtttgctgttttccatgttcttgaagattaccttagtccatttagttatgttactctcctggaacatttttactttcacaaagtcttattctttgacattgaagtcttaggttgtgtttggtgaggattttgacggaaattttttgaatgccaggagctaaaagaacagaaccccaaacctctccttgcctttgcagactgtttctgctgcagcagtccctcatttagccaggcccacagtcctcccagcggctaacttcatgtggacgcgtgcagtcttctcaggctctgcatcatcatgcatcttgccctgggcatatgcatagccttctgtactcccctacatgcgcaggtgcttctgaatgtcctaatttctgaaagaaactcttgctgattttttccccaggtcttgggagggctgttttatggtttggttgtaatcttttgccccaggcatctgctgacttttaatttgacttgcagtgtgttcaagagcaagcaaagcctgccttttttcttttttattagttagatgaaaaaggaaataaacatcttcagtcagttcttcaggtagttcctaacaaggtagcattgatttacacggtattttgcagatatggtcttctctgctcgctctgggaccaggtgcagtttgcacacactgggaactagctttcatgtccacaactgctactgatctaggataaggatagaacaaaaccccacagagctttcaagttgcctttttcttgactccttgttcatttggttctgactgatctttgactgtttccaaagtcagtgcagagtttgttctgacagtttttgttttctgatgtttctgttgaaagatgagaatttagagttgtatattctgccactctgcattctcctttcttttaaaaaagaaaattctgtttaatatttaacataaataacaaaaatattatcttcttaaattaaaattgtccacttcgtgttatttatttcaaatagttgctatgcatttgttttacatctgagtttcattatctaatttaataatctgaaaatattatgtagagaactaaatatgcctattaaatcattagaatgtagacagattaacagtagagaaaacgaataattattaaataaatttcctacatttatttgagcactagctcttaaacctaaatgtgtggtcctagattttcagcataaataattgacttagcatattgtttaacttattcttgaaattatgtaatatttttgtggctactgttttcatagacaatactgatattatataatgtatgtcaacacgtgaatatacttaatttatagatttttttgtatcgttcaccttgaatgggattttaaatttacgtaaaacatttcagtagttatcctcattcatttaaaaaactcacacagttttgggtgtttacactattcatttatgccgtattatccatcataactaaaaatgtggctacccacagctttgttttcaacttagtttaaccaaatattttcccattactattaataattcatcacacacacttgatgatatttatctgacagttcagaagtcagccttttttaaattgttgtacttatcagaattcatacctagtgtgatatgataccctaaaattagatttttttatgtataagctgaaggcatagttgagtagatatgcttgtttatagcagtattctgcttgcttttaatctaaccaactttaaaatcttggtcctcccttacaaagcagatgtttatgtattaaaagcgctattgaaatctattgtaaaccttcatttagcatgatttcaacactgcacagatactgtaaatgctcttggctcaacatgactgcagtaaaagctaaaaaggagtccaaatttaatttattctacttttgaaatttaaatcatcattatacatattatggttttaataagttagatacaaaggtagaatgttaagaattacaaacagaaaatactatatgctctttgtatcctcattaaaaacaatatagctatgagcatttttttttcaaatcaggcaactttgtttaattatgaatgttgtgaactcattttacaaagttacttaccaattaatgagaaataaatgtgttatgtaaatttcaaactgtaatggtcacaggtaattgatgaactgttcctataaatatatacattgtacaatcttatgcatatatatagcaacacacaaaatttgtacattatttattgtatataatttgtatatttatttaaaatttactcaataaatatatcgagtttagtttttggttagtttacattaaatattgaaaacaccttaaaatcacaattgtagttttaaagtttactctgttgttaaaattacttttcaagcaagtgaaaggaactctttattttaaaacacatttgttctgttagatcatttaaaggtctttgtgtgagagtactttaatgcattttcgtgcacgtgggggtgtgtgtgtctgtgagagagagcgggagggtgggagggagagaaggggagatctgaaagcaacccatgtatccttgttacagttacagctccctgacagcttagttcaagaatcagaacagcaagggaaaacagcatattagactctcttgcaccctctgttgttatttttgaggaacactacatttacctcccatggttataatggcattagatttattcaagtccctgataaaattaatacttaatttactgtacttccctccaaactatgttgacagtaaagtagcatttgtttttaattcttaggttgtttttttcttgtgatacaatatgtttttattgtataacagcttaaatgaaaactgaacttttctgtttgtcttttgatttctcctagttacaaccagttttaagctctaccaagtgtttcacacaaatgaaaatctgactggatatagcacactgtatatgtaattttccagaattataaatcctgcctgttcttttgtaaacctttcgattgtcagacagtttctttccaaaataaaaatctacagttgtccatactaagattaagaatttataactgtaaggaacagatgttttcataaacatttgctataattaatttcaactagagaattgaaggaacaaagcagttttccccacttcaaaactttattaccttttccccatgcagcaaactctgaagtcttttctctaatactgtttagagaaacgattgtactccttatttggtatgtttttgagaaagaaaaactgctttttttccttattactatcctttgaaggttacatttaatgtgatatattcatttccaaacaggtataaaatgaaggaaacctttgtgatgtattttgatgacaaaactttggtgtttactgaaaatctcttaattatttgaagtattttatatttattgtgataatataagcagagggcaagaatataccattggtgagatcttatgtatttaaataatcatagtctttatttttgaagaagaaagctcacattctaaatgtatgatatggtacttattctatactatactgcttgtggaacgtttcacaggaaatgtctgcaagctgttaataacatgtgttgtaggaaattttcacttaacaagacagagggagactaatttgccttaaatctttttagtttatttatgataatgctattaatttttttgaaaagcaaatgaagcatgatgtgagtcatcttatggtacccatgttttcaaagaattaacaaaatatactcaactagattgatctaacatttaagtgttttggattgttttcttctataaaatttggcaacattttgaatgctgtaatttttaaagtttttgtttaatgaaaaagaaaagcctgagagtgtattttgaaaaaaatgaagacttaaaatttcagtaactgagctcagaccactttcattcttttaaataatttaggtgcaacagcaaagattttgaagagaaccaacatttttgacttatctgtcaactataaaacatgcaaagaaaaataggcagctatcattaaaattgcattttagctttcagaaatcattaatgagcagcataatcatagtagtagggtaccttcagtgctatattcgattatttgaaataatctcatttctaaatggaaagctgtgtaattactgtttgacctaaccaggactactccgatgacgttcagtgatactttagaatgttcaagtggattaaaagtataaataaaagttggattaatcattaaattatgaagctttaaatatcttaaaagtgaatataacctgatgtttgaaatttacattataaaaggagtgtaaaatgtaatcaggttctgatcaatttaatttgtttctaagaataagtgatatgtttaacagtagtatctgtgctttcataaaaactatacttttaagtatatatttaaaattttaatctaaaattaaatttctttcaataatatatattttatattgtagcagtttttaaaacttacttagcaaatttattctatgatctttaaaaggataggtataaatttgttctaatctgattctatgaatatgcttgtatggacaagtttttctccctaaaagtttaatgttttacatgaggcagaaatacctttagatgttgattttttaaacaggtgagcttttgcccacagttaaaacataacatttggggaagactgctaaggtgtaataaaagctctttagaatgcattctcaatcaccacccttgaactctgcaaaccagattcctggagagtggaggaggggggccaaagtggagggggccaagtcggctgtatgcttgttctcttcaggtcttccactggacaggacacgttaataaaaagttgccttttgtttataagcattagtgtatgaacaaatggtgtacaagttttggttttgtgattcataagaagaagatgtctgtattattcttcatttgttcctatttgtggttactttggtaatattcctatccaagttacgagtggtggtcttagtctagattttagtgtcaaaatgaatttttggtttaaagggctctgattaaaaaagctatttgggggagagataagggagtatatgttttctgactcagtatactgtgtggagctgtcacacagcagcttttcaactgaaatgttcagttttataatctccattatttcagtgtttttcttttctttttttttccaggagattcaaatcaaaatggaagaacaagttctttagactctgatgggacttttaattcctataggtacgtgatgaatacatagatataagataagataatgtacaagatacgtaatgcagaggcttctgctcttagaatagtaaggactgtaacctatgctttagcagtgtgacaaacgtagagtgctgtggtatgcgattgtcctgcagacccatcacgtgggtggagctgtcgtaaacatctgctgttacctggagtaggatgatgagagtgtatgcccgtgtatacatgtattccacttcattataatccattttgctttgttttccagtatatctgttacagtactaagggcttcctttgtgtaagtttcctgctaatacagagtgtataaaatgtaacccgcggttgcattacgtgctattgttaatgtcctgtttggctcctttaacaaaagtgaagtcgctcagtcgtgtccgactcttcgtgaccccgtggactgtagcctataaggctcctccatccatggaattttccaggcaagagtgctggagtgggttgccatttccttctctaggggatcttcccgacccaggaatcaaacctgggtctcctgcattgcaggcagacgctttaccgtctgagccaccagggaggctctcacaaaaataccttatagatattggagttacccagtcccttctttgagtgctgaagtgtaatagaaagcttggaattgacatattaaataataggcagaatcttctatccaaatatgttaatcacacctaaaaagtagacgaatataaaagatatttacttattggctgcattgtgtggcctgtgggacctcagttccccaagcaggggttgaacctgggccccagcggtttgaaagggcagaatcctaaccactagaccatcagagaactctctataaaagatatttaaataaatgctcatttggcatgtaactgaggaatgctaagatgataatacatgtgaaatctatagtagaagtatcattttagatataaatactgttttaaaaaaaaacaagacaaaaggaaaataaagatgtatttcaaaggatgggaaggaagtccatatgtatgcatcgattttattgttgaatttcacagctacttttgtagtttagctaattatagtaactaatggacataaagttaagagaaatgtgttaatatgaaggcacagtgttatcttgtagtttattttgttcttgagtagtttgaagattaaagtatcttagtattattgaatgataattgtactttgaaaatgaactcctaatgcaactttgcacaataaatactaatgttgttaactaatatagttttaatcaatgcctgtcagtgttgtaatgttaggatattaatttattgttgtaattaaaaaggcaagataaaaagctcaggtagtacagtatataaaatgagcttttaatagttggcaggccagtgctattattaaatagtattatagtattcaaggtgtgaaatgaatatttttctactgagtaggcaatagctcttacaatataatgagcttacttgtgaatttgacacttgggttaaatggcagacttcatacaagcacagctctagagtctattttcatatcagattaactgataaaacctaggaattgttgcagaatcacactacagtggcaacagaattgtcagtaaagttcaaaaatgaaaattatttttccattactatcagagctctttaaagcaagcagaaataggttattagaaaaatgtgaatatttcaaccctcaaatatcgtttagcacaacacatctacctttgtatttagaccatctcagaaatactgatctttcttcacagataattctgtcaacctagtaccaagatactcaagctatatatgcttgtgtctgagataacagctttaatttgttatctgtagaatggacattatagtgtctgatctgcttctttctcacaactgttttcaaggttgaaatagaattgcataagataaagcctttggaagctctgaatgcacagccatggattactgtcatccacgtattacgcttagctcaggcgaatgggcaatttactgccctagagttcacttaccctccacgtgtgcacccctttatggcatatgatgaggttgtactagcttttgaattcagtcttggtcacctaagtccatgttctctctgttctttgtttatattattgtagtcttagattctcagttgtaagagggcatggcctctttttttgtgtggtggttttgttttctgtttgttcatattatcgtgacatagtaagtcggttcatatcctgactccacatggaaactttggacaagtgttggactcagtttcctctccttgaatgtgggagtgataaaacacatttgttacaaggcgttaatgggttattcttatatgccaaacactggatcagtgttaactgcttttatcttccaatccacgtcatccccaccattgtcatcactgttgatcttctggaaatgtagaagatttttacagtgtgctaatatagagacaccaaaaggaagatttaaaaacagtgtgtcctacaggaaaatagctgaagtttttagcagaaaggaggctactgtgcgctgcgtgccaagtcgctttagtcgtgtccaactccgcggccccgcggactgcggcccgccaggctcctctgtccatgggatttcccaggccagggtcgtggagtgggttgccacgctctcccacagggggccctcacaacccagtgcctcttcctgctgggtgttgggagctgggccctttaccactagtgccacctgggaagcccagagaggggctaggagcaggctaagcccaaggcacgtagtctgtctcggatgcgtggtccaggttggctttgtgtaacaagcttgtacacatggtggggataaaaggaagatgctttattatgaatatttaagtgcaggggtaggtttttggaattttgacagatgtgaaatttgcagtcagtgggccctgacaacagccctatgcgcctaatgctcacaggtttgtttccagaggcttggaggtttcactctgggtttgtgtctccagtggttttgcctcattgattcagatagcacacggctgcatttaactcctaaggctccagtagggtgattttatgatgcctgggtaatagactaaatcttggttttggaagtttctgttaaaatttatttgtatcccagctagtctgtagatgatgtggtaaaatggaaagattagaagaattgagacgatattactggtttatgcagtgtatcctgtgctttttaaagaccagcgttaatgtcttctgttattaaataagctttatgtttcttacttcaccattaaaactgagagacccttgctcggtgtgaaagcagagaagtggtttgctttcaccttagtggcttcagcctgggccacatggcgagtgccttctcccgcaccccctgcctcttcccaagggcagctgaccttctcctctccaaagaggcgagccccttgccagcgcatatgactacagactattacattaatctgtttagctgtagtaccagctgcttgcatggttttaattatcttattagatggtataacagtgacctatgaaataaattgaaggtgaacatttttaagttttcccttttttaccctatgtttctaaatatctttattgataaaattttgatattctgtaaaagttcattgaaagtatatatggttttgagtcaatcaacttaatgctctttaaagtatagtagtataattaccagtataaaagtaacttcatttttgcctcattttttataagatttaggttgtgtttatgtggccacaaattcatgtgaaaatttgttgctttaagagtcagtttagagaaaactcagaccagttgttggcattctctgggaaactcaaaatattgcttagatttcagacaacatcttggcattgtataaatggcataagatggaatacaaattattgtagattattttaaaataaatttgtctatttaactctgattttttttaaattctttgtattcagtggtagatcatctagctgaccctaattatttttacaatttaatttcacatgctactatttctgagtgtattttcccaagctgcagcattagaaaaattgtatcatcttctggattttgacagtgggatactttgcaaattatacttaaatagaatgtcgactccaagagacacagttcaaaataataatgaccagtgattattatcaataaaaattataataatttagtcagaagctctgatgtttaattaaaaagcaggtagttggatgcaaaaagggactgcataatactatgtatgtcatttgaattaacagatcctacagctggcatgatgcagtgacttgagccttgaaaaatgtatactctttgaatagttacaaactacacattatttgtttttttaattaagaaatattcagactttttggcttccatagtttttttccctctaacgaaagattaagtttcatatttcaaaaggacttttgttaaataagggaaatttttcctctttatatattttattttctttttaaggaaggaaaatgaaaagctacttggtgctgaagtactggtgtattatttcttgatattgaccagagcttccaaggttgcctccctttctcaatatggtattttctgtaggtcctagagtccaaagttaaaagtttaagttggttaatagttttttttttttaattggtttaagttggttaaaagtttttttaaaaaatatagttgagtcatcgttttgaatttaaaagttgtctttttctgaataagtaaagaaaacattaatttgaactttctttagtcattgaggaaattttaaaaattagacttcaggttttattgcaaagatatttatgtgtcctatttacatgtgattaataatttgaaaggatgtgggaagtatccttaatgtcatttacatttatttttgatattgtacctctcccccatttgtatgtaagagggtcatatgtctcttgaaatgaaagtgaagcagtgactcaaaatgttagaaataatagggcaaaagcgtgttttgaatttaaaattagaagtctgcattatggttatagtcttggaatgatataaatttgttaatccattatttttaggaatatggaattacagaaacatactgtaatatgtttttacagaaacataattgtgaaagttacactgtattagtttgggctcttatgacaaaataccagagactgggtagcttataaacaatagaaatttatttctcacagtttggaggctggaaagttcaagattaagatgctggtagatgtggtgtttgatggagcccacttcgggttcatagatgaaatcttttcactgtgttctctcatggctgtaggggcaagaaagttctctgagagcttcttttgtgaagggcactaatcccatcactcagccctgaggacagtcgcctcccaaagacctcacccccgaacaccatcagattggcgtcagaattcagagtgtgaatttgcggggccacatgccctcctccatacgttacactgaggaggaggccgaatggaactccccgcccccttcttcactcactcatctgaagttcctaaggcctcgccattttattcattttccaggacgttaagtgaagtggctcactcgtgtcggactctttgcgaccccgtgggctgtaggagcctggtaggcttctcggtccgtgggattttccgggcaatagtactggagtggatcgccatttccttctccagggatcttcccaacccagggatcaaacccaggtctcccacattgtagacagacgctttaccatctgagccaccagaggacgtaggtaaataaatagataagagaagagggtctggactgagggtttctttcctgattcttaggacactgctttcctcactttgacgttatgcttgtctgttgagaatccatataattgtatgactctgactttttaagttcttaaaaataaatgcacagttgagggaaacaagttggaaaagcacacaggtagaaataagacagactgaagtttgcctctcagctccagcacctcctgactgtgtggtcttaagcaaggctgtcaagctccctgcttcctggttgcttcatctgtgaagctgagtgtcggcacctcctctgtcatagagctgtgtgtggctggacccatcacctgacacatagtgagtgaccatgccagtttctttcttctgtctctcttttccaaaattcctttaagttttaatcaagtttttcacctaacaaggttggccttcatttcagaaaagtttttaaaattctatataaaagtgaaggtcgcttagtcatgtctgattctttgtgaccccatggactgtacagtccatggaattctccaggccagagtactggagtggggagccttttccttctccaggggatcttcccaacccagggatcaaacccaggtctcctgctttgcaggcggattctttcccatctgaaccacaaaggaagcccttatagttctatcgtggcaataaatgagtatttaagaataatatctacagttatctgtacaaggtcagatctatagatatcgttatctacagattatagaggaagaatatttagaaaaccaatacttctgtttagcctaacattatcaaatgttcttaattatttttttcatatgtgctcaagtagcactgtaacacagttaaatgataatttcagagagtacaaaattaatcattttattttttggaaaccaaaatcagaatattacctttaattcttatctccataatggagccacatttgagagaagaaggaaaaaaatcacgttttaatgatgagtgtatcctcttcaagcccctttattattttttatgtccatggaactggtcagtagcgccatttctctctaacatattatctgtctgaactaatcattgatcacgtgaggctctgaaaataggtaacctttcacttaaattactaactggtttatttgcatttatagcctcagattagcataactcaaactgacttgatcatacatgttaacagtttgagttcctttccttcagaagccccttcaagccctttttattgtctgtagccaggctttggggaatttttttttttttccatgtttgtttatttacaaagttagctgcaggctccaatcatccaaggctgtgtaaatgtttatctttgaaaaaacaggcgtacatttgaaatatgggagtgagctgctcagagtcagcctcactgtgagtcctgtcccctggaagcacttaagtttcctcctgggctcctggtgaaaacgccccgtcagccccactgccaccatctgtaatgtatattagcacactgcgttttttggagacggggagattcaattaaatatttgatcgataatgttgaactgtgttattgaactcttaacttgagaaaataatgcatagaattaggatttaaaagtgatgttatacatatttttaaacattctacaaatagcttgcttatatccttattgatacattatatgattagttcattatactgcttaatttctgatgtttgatttgatggacagtttctaagtctcaaagatatattttaaggatgaaatttatatagaatatttcaataaaaattagtatttaacatttctctcttttctgtatcagattacctcgccttttgagggaaattggcagtgattaataatcctattttttagttttactccagagttttcacaagtgctttcctgacgtgtgtgtgtgtggtttgttgttgttcagtgtgagagctaaatatcttcagtcattctgcagttcgttattctccacccattacaggccagccagtgagctagacccagagagggacccagagcctgccgtggggcactcaccatctaggcggggaggcaggcttgccagcagctagcatagatgaagactgctgcaacaaggcaggcgtttcaccaagaactaggggcaggccaggcggctagttgccagtgagggtcggtggtggtcaggaggaaggtgtgtttgctaggtatagtagaggagtaggagttttccatgaggtgaacagtatgaacaaaagcagtctttattttctgttctagcactgcattcgtcaggggtttgggccactcagaatgggtaggtccgattagccttatatttgtcagtgacagtcttttgcatgtgcatttacatagaactgtttcgttgcagtgacatttttactttgcaggaactgctattttgacagtactgaagttttagatttcagtgtatcccagatgtttgatatatctaaatcaatgatcagaagttttaactgggaagtgaaaatgtgactcctgcacaaagttatatgaaacagtttatagtgatataattgagaatgaatattatgtgcctagaaataaaggaaaagtcaataaacctgccagagaaggcaatggcaccccactccagtggtcttgcctggaaaatcccatggacggaggagcctggtaggctgcggtccatggggtcgctaagagtcgtacacaactgagcgactgcactttcacttttcactttcatggattggagaaggaaatggcaacccgctctagtgttcttgcctggagaatcccggggacgggggagcctggtgggctgccgtctatggggtcgcacggagttggacacagctgaagcgactcagcagcgtaaacctgctgtggaacagaaggtgccatttgaatgtagaagatgccctagttccatcccaacacacaggcctcgtgctcattccgaggtcgtagaggccctgctctgagataggtgacatattctcaaggagtttcagagactgtgtttccacttccttgtttaatgttagaaaagtaattcggatgccatgcccaaggctctgaacccatagaaacatgacacggtagttagctctcactccagttcccaacctgcttctaggtcttgaggttcccttgagtggcaggggcccactgtcatggagccagacccagtgctctggtggtttggagtctgttccagtacaggataaatggatagtgtccaaagtagctccttcacttttcacgctctcctgccctcacctcaacgcagggccaccccaaagcctgtgtctctcctttgtattctgtttgtaagttgagcaggggccagttttctttttacctgagagatctgggagagggtggatggagcaggataagtaaagccagcggggtctgtgtggtgttttgagctctgttccgaatctgtgtttcgccctgagctgccggtggagccttctccctagggaagcaacccatttacctgcctctgtatcgctgctgctgctaagtctcttcagtcatgtccgactcttcgcgaccccagggactgcagcccaccaggctcctccgtccatgggattttccaggcaagagcactggagttggggtgccatcgccttctccatctgtatcgctaggttccattcttaattgtaatatttttaaaagttctgtagaaaacaaatgaaaattttcttctggtgctgattttcagtcttacagtagcacttcacaacaactttatgaaaacatcccatttgttcattatgtggtcatatgattaatttttttgtggcattcatttggaaatgcctgagtttgagagtgtacaaattaacagaatagcatctagcagagtaacaaaaggtcttttgtgaagtcaagactagatttgggttcttttgaagtatatgaactttcaaataacataaaatttcagcagtggcagatacatctgcacatcaacacaggactttttctgaagcataatttaatttgggcaagaaggtcatgagaaaaccactcatctcccactgatggggagcagctgtttgcaaaaatcggtggtagaagctctgctcctactggtgctgcgtgggaagcaacatgcagcccggaacccggtctcacagcctgactccttcacttcagtgtcttcccgatgtccattgttaaaaacagcgatcatcccacttctttggacatgcagctacgtgtaatttatttagaggccagatttctaatagcttcacccaaggaggatgtaatcagaaacttaggaacggggaggaaaaatgagtttgttcatttaggtagagtcagtcacaggaagtgcttccttaatttccttccatttacctaatttcccatttttttaattaaaaaaggctagtacaatttatgctgttgaagtaggctagagtgtatgacagttcaaagtctagtttgttgtctttcttttaaaaaagacaaactgagcaagtgacagaggggtgcaaatttaggatttctaaaagctaacatatcagtttataaatcagtagctgatcccctgacaatcgtggctgtgagagaaatgccactaaaaatggaatggaaaattccaaaagccaagcagtgtcgagttagttaatgtagaagcaaatggccatccattatccaaatgtgtataacatctggacagaatttctgtaagtttttgaaatgttttgatactcaacatttttgagttgagaaaagaaaaatcacttacatggcataccttggcctttcatcatgcagggtaaattagatatgcaatcataagttttgtttcttttttttaatctataagtaagtgatgttttctagtttttttcacccttgagtggggttatttccttttccaggggtccatgcaaaattgttttcctaggtatgttagtataacaaattagaaagcacacagtgacattaaactaaagtttatttgatcacatggcccattgattttcatttttaatggtcatttcctggatcttggagccagtctcttgctgagtatggttaggttatgctcacagttcaaatcttgggtctaattctttccagtatcactaacttttagtaacttgtagatggaccatagatgtcattgtaagtcttgcttcgtgttgggcatctgtgagtgaagggggaggaagcaggagcagagggtggggcagggtggaagcgcaggcagtgagaggcagcgggctgagagacacggagaaaagcaaatgtctacctgtgtaactgacttgacttgcagtggcttttcctctgtgttgcctctcttacagagtcatctttgatttttttgaagccacttgtctcgtctaacttttaaggtattcctgtctttccccagcagtgctatctgagtgggtgtcatatgcacacttatctttacatcccttgagcctttgtagttgttactttacaaaatgaaacgtgtgtgtggttatcgtcctaaagcagtttgtgtttcactgtccgatacaggaaccactagttgcgtggggctgcttgaatttagatttaaattaactaaaataaggtctatcattgttcagctgcagtagctatatttcacatgcttagtagagtattatgtctgaccgtccaaaactgttgctaactccgttcttcattacctaccatgtgcatactgagttagaggctcaaacttccttgagtcacagttaaatctgaaaaccgaatcaaagcatgatcgtaagttgattttaacgaactgcctcaccccgaactgcctgctgcctttgtttcaatggtgccacatcacatgagaacattttccacctagaaataggaagaaatccattttaggcttgtaattgtgagttgtttttatgagtatttatatatatgtataagtaatatgtttcattatgaaggagaaaaaaagctttaaataaaagtaagtttttaaaaattcctgatataggaagcaaaaaagccagtacaatttctaattgccttttagagtctctgagttccctcattacctgtgatttaagctaaaaatgcggtaattacagatcacatcagtgtttatctggttgatcccgacacctgcagtcctgacgcagcttacccagatctggggccacacttaagagtctgatgctgacattcctaatttacgcttctcccatttcctttgatttttaagttagatgttccttgttctatcccaatagtattttaaaaactatacctttaaaatgttataaagacacatacgtttttatgtggatattggaatcatggtacagtcctttaattaagaggaatctccccttaacacatttctctgcagattaaaaatttgactgtgtccttcttccctttgcatttgataaagcaaatacggtcataattaatatggcagtctttccacatattgacatgcactttaggatagtaaaattatttaaaccatttcacatgaggtgcagttttcttccctgtggttccgcacctttagacagtcttcccatctaactctgatcttgtccagtttaaagatcacctttccttggcctggcctttagtcctgctgttgctctggtcagaccacagagacgagatggccttggctgaccagccaccgctgagagctcctgtgccacccccccttatcctaactgccccgtctcttcagcgatgtctcagccttccctgtggggcagcccttctctgttccactcaacaacttcattatctgcaagagcaaagtagtgcctcttaaccaagtgactggaggctctcaggactagactgtgggtagcctgtgaccgctgctcagttattgtaggtgccggggtttcttgtgttagctccatagagatattgttccttgtctaacgaaaaccaaaaaatggggtaaaaccattacgtaaaatatacaatagagggttttttctgtgtatcctcatttgggagagcaattcagaaattttttaatttcaaaattggcatgtcatttatgcacgcttcaggttacaaaaatatttaaacagttaaatgtagaaggtgctaaccagtttcacactctttttatgtgcatatcttgggaagtatgttaagaggttctattttcttgggctcccaaatcactgcggacgttgactgcagcaatgaaattaaaagatgcttgctccttggaaggaaagctatgacaaacctaggcagcatattaaaaaggagagacattactttgctgacacaggtccgtctagtcaaagctatgatttctccagcagtcacgtatggatgtgagagttggaccataaagaaggctgagcactgcagaattgatgctttcaaactgtggtgctggagaagactcctgagagtgagcccctgaacatgttttcagggacccggtgcctgcactgcagaggcttggccactaggtggcaccagggcatgtttatgagaggtttcaagggcctggtctctataatctgttccatttgaggcaattaggcacctaaatgtcccctgtgttcttaaccactcacagcatctgctgactcaccttctcagtccagctggtgaaaacgtatctctgtacttttggacctcatgttcaaaacctaaagctgtaaggaaagaaatataaggcgcattcctgtcctgccctcttggggccttttcgtcccttggtgtgtggagagccacgcttccctttgcggctgccagccccgtcattcaggatggtctggcccgcgttctcattctttctctctcgtgacagtttagttactttttctgagactcagttttgtcattcataaagaggggttgaaaatactcaggagggtcgttggaaaggttaaaagtgatttacccaaaatataacaacagatcataacacgaatggattgtttttcagcattttgagagcatcattgctagaatttttgctacgacagactatatagttttatgtaagacaaagttaacaactatctcttctttactcttgttaattaaatgggaaaagtccaccgccgactcctcggtacttgatattcttttcccaggttccagattgttggccacggtttgtatctgtgattggaaagaactttccttttggtccagctcccctcaacgggttcagctttcccacattttgtcctctatacactgttcaacctctggcagctaagtttttgggtggcatttcagtgcctgtggggatactacttatcgtgttttacactgagttttaattttttgatgtaaaattatttctccctcctctgaactgccacagtgctttgccttaatcacacgattattggtttacgcatccgtttgctcccttaactgaatgcttttaaaaaatgcctctaagtgctaagtacacagtaggcactgaataaatgttcattatgtctactgtgtatcacagtttattaacaaaacaccgtcccagagaagagaaagacagtagattattttgtggcctttatgtgcctgtgttgtcagagctctccatcagtttgagatttgtgttttaattagaactataagtacctctgaataaatgtaaataattgtgaatttcagagagaatgtttccattttccatgcctcagtctccttttttctttaccaacactgtaatcaaggcacagggtctcatttgagctaacaaataattatccttcattacgtaagtgctgtgtaacttgaccttaaaaggctgcggaacttgacgagccagcggtggatctagccagctgcgtctgcctccacggtgcgctgggccctgtgcataggagctgctttggaagagtctgggggagccattgcctcacacgctgctccctctctgatctgaaaagcactgttgctttcaggccatggagctgcatggtctcggagaaattatgccatttgaaatctgtgttttctcttcgtagactataagctatttaaacagaagcacattttctgagatgtgcgcctatattgttctttgttcatttttttttctcatttttgactaaaactaaaagcaaaatttgaacaatgagatgtgggtgatatatgtgaagctaatgggaaatggatagtatatttaaaatttcatagataatacaaatgaactaaagtaattttcaaaaaaccgaattgatttccttgaacttgaagtggctaagaattaacttaagcatgaaaacaacgtaaagagaatcaagaggaaataaatgttaggtttaaattatatatgaaaagtttcagtggtttgaaaatcaaaataattaggttaaaaatacacatacatggcagacagcagtgtctttaatgtatgaaacacttctctcttggaccagtaagtccaagtaaaagcagtgttgttaacaacagtattaaatttttagatgttatgatatgctgggtgcccttttaaggatttttcatgtattttaattctcatagtaattattggaggcagctgctattattattactccatttcatagatgaggcagcagagacacaggttaagtgaatttcagcatgcttgcacgcctagtaaagtatgtagtttctgaatggatggctttctttgtatcgcagaagcgtggctctgatgcctgtcctcttggccagtagcctgtactgcttaaaatgggcaaagggcaagaaaggacattttaaaaaagaataaataaaatggcccaaaatcatgaaaaattttctgtttcactaatgatacagaaggaagtaaaactctaaatgaaatttattttcttctttgactagggtgatggaaataagacgtttccatggaacagtggtaggaattcatttctcccagtgcagggctgtggggaagggctgaggttctctgctcggggcgtgagggactgccgttgcctcggccactctcctggaaggctgggtgtggaagatgcagcttgctccgcagtcaggggccagagcactgggcgtgccgctggttgggatgcacagtctgaggtcacctcaacacgagtggggcctggccaggggcagccacgtgcgtgacacagaggacgattgagaggttccacagcttccttttgagttcatctttctgaagagagtgccaagcttgcagctttgatgataaattttacattatcagtttattgtggcactgtggaatctcagggaaatttcatacagccgcactaagtcacctcaactgttgacaaatgattcttgatgtttagtttggtacaagatgcagagaatgtaggtctgcttcctttattcaaactcagtaactggtttgggacaattaatttctgcttgtttcccagtagagcagctttacttgtatattaatggggcacaggtgttgggcccctggtgtctgtgtgcctgggaggcatatttcagttgtttatctcctcagccataggtacggcaaggtactcaagcttgcctttcacagtttttacagtgaggctttttaatttttttgattttttttcacatttgcctgcacctgttaaaattttaaaactgttcatgtagaaagaagttgcaaagatttcaatagtaaatagtactaaaaattgaaggaaataatcttctattctgtttaactgcccggccttacgtgagagagaagtgagttgatttcatgagatctttcaggtgagaagccaatatgatcaatcaatgacccaaattttggttgtgtatttttgaaacaggtatatctttcttagtgtctaaagcagtcatatacttgtattaatattcattttttttcttgttgattcactgaactgcactaccaacatttaaaaggcagtggaatagcctccacagacattatgaatttcagtagctggcataattatagcgatctacatattcattaaatctacaggagaactctgtccaaaaagacagccatgcgttcagaaacagacaactaaatatatatattttaaaagttgcatctctgaggcttatttaaaattaaattcctgtagcactcctctccaagcagaaggattttaacaaaaggatccccacgctttggtttcttgcatctaggaaagaatgggaagaactatttgtaaacagcaattacttggcaacaataaggcagaaggggattaatgggcagctgagaagcagcaggttccgcagcatttgctggaaggtaagaagaaaatatttatgtacagtttgtggttgcagtctatcaacacattacctgatgccctgggagagcacccgtgcgggagatcgctgagttttccaagagacttcactcgcgaggtttggctatctaggtttatctttcataggacatttgctaataaggttgaagcaagcgccttagtcctggatagctggcgatggtgcaggagtcatttgaaataccggtcttttcatcccatttgatggtgcggaactcaagcaaagccttctgggtctccagaggcatttgcggaaatccttggcgctgggctggggtggtgggtggctgttttcaggctcctgttatatcgagtgctaccatgcagtcgcccaccttcatttctgcccgaatagcagacaggaaagacactttcatattttctgtactggaacacagtgaagggcagcgagaaggagaagtggagagaaattaggtcagtttctttcagaggaaggccattggtcatcccctgggtaatgacaatctgcagtgtccctcatggcttagaaatcggtccctttttgttctttcaaaatgaatcagtttagattgagactcactttttaaatgacttctcttgaaagttgtttagggtttatctgcataaattgagcagacggagccggcaagtgacaacagtaaggaacacttaatgtattagacagtttgaaatctaataattcaggtttaataattaaagtgcgttttccttctgctcagtgaaggcagggtcgtgctgctcggctatgtgtacaggaggctttgcgccccccccccccaactccatgttgtttaactttttgagtctccttcctttgctaaaaataaactcaaacccagttttattttaatgttttattaaactaaattaaatttgtctttttgagaatgcttgttaattttgtaaactgattgctagttgtaaattgcattttctgctgtaaaaggaatgacttcactgctcaggcttgtcctcgaattgttcctctctgtccattacctgcttgtttgaagactgatcttggaaaccttgatgctacaaagcggaccttgtgcttgttaacacactctgtcaatcaccccgtaatgcaagaaaggggaacagggcggaccctaaccctcatgcgttctccttgttcacctttactgtagctctggagagatgatgccatctcggggtgtgtcttttagggtcttgcttcctggcctttgtgcacttctgcagttgtccaagttggtgtatgtcttgcacaccccacatacagttgtgagctggaatggtgatgagtgtgaagcaccgcgaatgcgtcttcttcagttttcaagtcatgccctttggtgtagtttcatgttttctttggatttttatgaaagttttcctgttttttttttttttttgacagctttttctttgtgttcttccgcaagataaaagtcagtggatgagtaaaattaaagaactaagagcatggtatagcagcattaaagaaatagtaagttgtgctctaagtaatgtaactgtgttcttaattaggctttgaaggccagcagcctctgacctttgtgtgtgtgttttctttctttccagcacatcacaaaccctaggaaggctgttggccagcaagacttgatgatcaataaccccctttcccaggacgaaggggtaaagttggtgtttattcacgtctcggccgcgcttgcccatcagagcacgcttgtgtctcgttctcagtcaccgtggaagcagtgttactgtacaccagtagggcgattcttttaccaccgtgttagtccacctagagccgggtgggcgttattccctgctgtgtgctggcagtgttgggggaagccaatgggctgcttctggagacaggcacggtggaggggaggccccggggctgtgagagctcaggggcagagagacgagaaccgagaggagggctcggctggggccgaaaggccgccgtgcacagagcctcccttctctcagaagtgagaaagcagcaccgggaggacagctctgcggaaggagatagctgtgtgtagtgactctctgaacagggtttaagatcatgaaaaagatgaggccctctgccctcagatcccagtgaggacgaggagcgatacacctcagaggcactgtgtcgcttctccagttcctctttctgtgctgaaggacgttgttttgtttcacattttctgtatgaaattaacatttcttttttcctcatatgtgtaattatagtcagtgaatattaagcaatttttaaaacttgaagttcatattttaagaaatagataaaaaatctatgtgcttatgaaaccaaagctttgtagaaaacattacgtatctttctgtgttggcaattcaggtcaggttccagtgggaccagctggcctgtggtcctcctctagttcaggtagaccagttttttgttgtaagggtagcagcagatgtctagcagtaaaagtatcattcactttaagaagatagtagaaaattttaaatatgcacagtaatatcactggaaaaactaatgatagaatgattatgtgtctctgagattagactagattttaataaagcattttccagttccaggttttctatctgcaatgtgaaatcataactcagagaaggataaattttaattatttgaatcattagattgagatcataaaaatcaagcaaaggtgcagtattgttttaaataaattgctttccttatttcagagtctttggaacaaattcttccaggataaagaacttcggtcaatgattgaacaggatgtcaaaagaacgtatgtagaactatttacaagttaccttcagtaattcagactggtgttacttctttgaaattttagcaaactatacaatctgtagaggagccttagtcgaatgcagtattctacttgtgttaatagtttttttggccaaattttgatgataatagttactttctattcttaaattatagacttttgtgttccctttgtcaaaataagttacatttataatattggtaataatataacatatcaatacttagatgtttaaatcagtttttcagtttccaacgtttgcttgtagtcatgtgcttctaattaaggttatgttttgtagtcttaatactggttttgctagaaaaaaattatctttttctttacacttttgaatccctttctaatcaaattactgtttaaatgacaggtatatttttacccccctttacttctgttcctcttgacaccattccagtttgcaaacaactccagatcatctcagtatttactgtatgaagtggctctttatccagcatatagttaatttctgtaacttttatgtattggacctcacttttttgggggtcatgtaatgaggaacacatgaaatttgtgtgggaagagcctggggtaagtcctagcaaggtctgctctaatcctggacaaagtaatttcaacaaaggtctttccccctagatgttcatttctgcaaaacggagataagaccaagcacctcattgcatagttacaggttcacatgttgttagtgttgtaaattagcggtgtctacattttaagctgtgtcaatgtcagccgagcgcccttcctcaccggggtctgggatgagcccggtgtctgagagcccgtacctccagggctgccttccagggcccccacgcctgtgtctgtctgccccactccggttcaggtcccactctaccgggtgcacaggcaggcccctggctccaacactgctctctctccaggccccagacagaatgatcagatgacatggacttgcattaaggtcatactaccgatttaacaagtgagattttctactttaaaacggaagtgcttcagaggggtcgtggggtcagagaacagcagcaccactgataactggccatggtggcgaggtggggccgggaagtgtgcagcgcttgggtgagcctggttaggacgaggagcaagcagcttcggggcagttaccctcctgagtcaggccgtggtgctggtctctcgtcggtggtttcagaaggcagagtgccgttgttttgcttcacaggaggccctcagtaaatatttgttggataaaacaaaaggatgaatttcctcacccatcgctttagtaactagctgggtaatcagtggtgataaaacagggttcataaaaacaaaatgcacagtgtataccatttaccaagcagtaacaatatctctttcttaaaatgctaggcagttatcttagaaaacttgatagcttacgtttgaagtagccaataagaagagtgtgagtgtctctgctgttgtcgaatggaagtggcactgactgtcaaatggaggcaccgtggcactgggcggggtcccacaccaggaccgccaggccaggttgctgaaggcagcggggcagaaggagaaaggggaagaaaagggtggagagcaagccaagcagtaagtggggctgtcagccccttcagcgctttggttccttagatcagacctttctgctttgctctgtgggaaaatgttatttctcaaaagctatattctgtgtgtttttcttataaaaatgtatgtgtgtctgtgtataacacacatacatggcatttttttccttatagtttgtctccactggtgcattttaattcaggttacaaagccgagatgcagaggccgcctctgggtgggggaggttcacacctccttccccagaagtctcccatgtctcgcctcacattttgaggaagtctcctagccatctctatggaaattctgtggcaagtgacttagcttgtagggtaagactatccttatttcaaagcctccaacttgccaatcataaaagctgagcagcttgagtcctctgactgctgctccttcaggccgcacgccctccgcaggaggtgctgtgggcctcagtcgtgtctgactctgtggcccacggactgtggctccccaggctcctgtcccagggaatttgccaggcaagaatgctggagtgggctgctgtttcctactccagggatcgaacgtgtgtctcttgcgtcttctgcatgggcaggcgggttcttgatcactgcgctacctgggatgcctttcgaaggcccttcatgatcccggatccatagttttcaacccggtctgaaccgcagctcatactgcacgggccggagagcgggagcagcgcagctccgtgactgttccccgtggctgcgggagagttggggggttctgactgactgtctcctgtgttttggacccgtccactgcatgggagatcagagtggtggggaaaacagacgagtttcctgttatcgtgggatgtacattttagtgtggggtgctggggagtgagacataagcccgtgtaggtacagagggtcatggaagaaggcagtgactgctgtaaagaaatcaaaacagataaccttatacacagccagacagatggctgctttaggagaggcgtccgaaagggcatctctgagaagatccgcgttgagctgaaacatgttatgaagccagcaacatggtgatctggaggaggaaccttccaggctgagagagcggctgatgccaagtcctcagtgagagtgagctgaggatcagcaggcctgctcggggtggcagtggcggtggggacgtttggtgcgctgttccaccaaccacggctaggagtttgagtttgaccccacctgcagtgaggagccttgagggagctgaggggagtggggacccaggaggagggctggggagcctggaggagctgaggggagtggggacccaggaggagagctggggagcctggagggtgtgagcgggagtgtgagacctgggagagggtggctgctgtgctgtcggcgggggcagaagtgggtgcagcctctggaagggcagcgggggtcagctacaaggcggactgcaggcggtctggagcaggcgccagctgaggacgcgtatcggattattgtggctttctcccactcctcagtttggctccattgttaccgctgttagggctcttttcacctctcacctgggagtctcttgtgtgactctttcccttgactctattgacttgcttttcctgtccacctcatgtgttgaaccctgtttctctcagacacgttcctagtcctgcccctacttgcctgtctggaccttctgtgacctctggttttgcagaatatgtgcttatccagactccctaacacacacactgtcccttttcagactgtccagttacctttgtgttactgacttctagttcaattccactgtggtctaggggcaggcatcgtatgattcctcttctgtgaaatttgttaacctgtgttctgtagtccagaatgggatctgcctctgagaatgttctatgtgagctggaggagaatgcgtatcctgctttgttggataaaagtgacctgtagatgtcagttaggtccagttggttggtgatgttgcttagttcagctctgtccttactggtttgctgcctgccagttctgtccatgtctgatcaaagggtgttagagtttgcagctgtaatagtggattctttcctttctcctgggcttcccaggtggctcagagggtaaagcgtccgcctgcaatgtgggagacctgggttcaatccctgggtcgggaaaatccctgggagaaggaaatggcaacccactccagtactcttgcctggaaaatcccatggatagaggagccttgtaggctacagtccatggggtcacaaagaggcagacacgactgagcgacttcactttaattcctctttacagctgtgtcaggcttcgccttgcacagtgtgatgctctgttgtcagggggctcttgttatggcctgtgtgtcttcttgtagaattgacccctttatcattattcagtgcccttttttatctcttggctagtgttagcattggatattgttctccagctatttccttttaatctatgtatgtctttatttaaagtggttccataggcaacatgatgtcagattttagcacgattccttgtaaggcaagtctatggacaaattctctcaatttttgcttgtctgagaaagtttgatttctccttcactttttaagggtagttttatagcacacagaattctagtttgacaggtttctccttctcaagcacttggaatttttccgtccaccttctgtcctgcatggcttctgaagagaagttgaatgcgattcttgattcctctgtaggtaagatgaagccccaccattccccgcccgcccgccgcctttaagagctctgtctttgattttctgcagtttgaaaatgatgtgctgaggtgttgttctttgggcattggtcctgtgcggtggcttctgagcttcctggccctgcggtttggtagctgatgttcatttgggcagtgttctcagtgactgtctctccagatgtttctcctgtgcttttctctcttctcctctccccgtgagagcccttgaatgctctgctctgtttttttcagtctttttctcttgcttctcagttgttgaggattttgctgagacatcctcgggctcagattctctcctcagctgcttccagtctactcgaggactcagcccatcaaaggcactcttccctgttaccctgttttatacctctgaatttacttttggttctttcttaggatttttgtttcttgcttacattgcctgtctgttcttacatgctgtctgctttatccattagagccctgagtgtattaatcatacttgttttaaacccctggcttcataattacaatttctttggttctgatgcttgctccgtgtcttccaattgttcttcctacctccaggccttgtaattttgtgttcagctttgtttttatgacagctagatgtgactccctggttaaaggagctgcagtcgtaggtcgtttgcagtgtgatgagctgaggggagggggaagtaccctttagatggacggtcagtctcccgtgcctctggaccgtgcccttcacgtgtttctcgcatcgcccttcccctcaggtggacaggatagctgtggtggggttgggctgggcatttccccctccccagggcacttagggggccgatggagtctcagcaggttgggctctcggcagctcgttctccctgcaggcaggcctcgttcagaagagcagagtcccctctgtccaggttggcccctttcccctccccctgccacagctgaggggatttttctctggtattcactgtgggaacctggccaagcttctagaggtgaatctcacagtttcgtgtgggtctccctatggtggagttttcctggagtttttaaccctcagaggtaaagcccatgggcacaggagcctggtggaccgcagtccacggggctgcaaagaggtgctgtccctgtgcagcccctctgctccagtgctgcgccccctgctgtactgagtccgacagctcatccttcaagcctgagttcatcaccaccctgctcttgaagcatgttccagtctttacaactggaaaaaatttgtgcctgttttatgtcccagtggcattttcttaataactttgtaatgatattacttacgtttctttgatactgctcaagtttatttagactcaccagtgtagtcagtacatttgtattaatctccttggcattgcatgtgccaagatgaatatggcgtgggcccttaggaagctcacagtctagtagagaaagcagacctaaagaaacttccagagcaggagagcagcgctgcgctggagagaggacacgcaagagcgccaggaagcgcccccagcttcatgttccagtccgggaggcctgtaaatgttcccgacccatgaccccacccttacctgaggcggactgtgctgtgctcggttgcactgactctttgcgaccccatggactgtaccctgccaggctcctctgtccagagggattctccaggcaagaatactgaagcttcccttctccagggcatcttcccaacccagggatccaacccaggtctcctgccttgcaggcggattctttaccgtctgagctaccaaggaagcccaagaatactggagtgggtagcctatcccttctccagagaaacttcctgacccaggaattgaactgaggtctcctgccttgcaggtggattcttgaccagctgagctacgaaggaagcccctgcccacctcacggtgctcctctgtgaatacctgggtacgtttgctcagcactgaatgcagtgcacaggggacctcggcccctgctctttggagcttgggaaaacaagccaagtactctcccaggggaaacatgggcataaaatagtgtgaacagtttcctcatttctttcactttcattatattattatcagcatcaagtacttgtattgctgtaacttgcaagaccctgagagaaacagaataaagggtggaaaataccaggggaaaacaagcacctccctggttgttagcccaggcctcatctttcagacctctggtaacccctggagggcgtttctgtcttactgcagagtcagggtggtgcctaattaatgctcattgattgtgaatcctatcacttatgatcagtgtttttcaattgtagtaataacatctctaacattttcaatcttcagaaacataaacacacttaaaaatactattatccgccttctagtctgagtttaaacaagataatttcatcttgtaagctgtgtttttttctcattatagaatttatttgatctgagtatgtcactgaattaaatattatcttctctttcaactaattttaatattgttttattctactaaccttttttgcctcaaagggttttgtattcatttcaattaattgttccttatttcagcctaatgaggttgttactgttctcatttttattactgaatagggaaaaaactgataatcaaaaggtaaatcaagtagcttccaatttatagcatttctacttcagaacttgagccgtccattctgaaccagttttgccatgcttcaaaggcttaacattatatgaaattcactattatttaaaatgatgggaaatattgagttcagaataaagtatcatttccatattatatactaaagaagtctgttatttgatctatcaaggattattttaaaagtatatttacagtgtctatactatcatttgcaaattaacatatttataggctattgccaaatagtgtcatcttttcttcagatgcctcagatgcctctcttgaagtaaatgattaaagtgtagctcccttttgtcactgtgactgtgacgatatttacgggtcgggttggtccggtcgcctctcgggcccgcagccccagcctctggtctttcatggttctgtgcagggcccttgccgtctgcattccgcgaggcagctcactctcaggctcattccgctctgccccacttggttctccgagacacggtcagacctttaccagccttctcgttcgatgatcccttggtccaaactttagactctctatttcagcaaactttgtttcctcaattttttttatattgttatttgatattttgtggattcattaataattgctaaaactttctctttaaaaccatagatgtgtactgtccactttggtagcccccaggcacatgtggagatttaagttgaaattaatttagattaaataaaataagtcttcatcagccactctcaagtgctaatggctattgtataagccagcacagatataggacatttctatcattatagaaagttctcctggatagtactgtgaaaataaactgattgttgttatatttttgtactgtatatgataggaacatatgcattttattttttattcacagtgaacttttagagacggcctgtgcttaatatttacttttgtttcctgtctctgcccttaagaacccttcttgagtttttatagtatataagtcttatatgagtttttgatcaaatttagttattatgtagtggatagtgtaaaattagactactttgagaatgttttctgtattaataatatacaaaagtgattttacaaagtttttttttttccctccttatttaaagtccatcttctacacatttcccatttttcagagaaatgatgctggttctctaatccaacagtgattatcacactagtgcaaagttaagatatcctaaatgttggtgtgttttattctgtttcctcaaagcccccccagcttttttttagttaaataaaaaccaaattcctcaggggaagaaaaattttacaagcaatttcagagcagaattgattttggtgtgtgttaatgcagacaatctgcccagtgttaaaatgttaaagagaaaaaaaaccacacaagctgccatgtccgtgtgatcacaccaaaatagcagcttgtgtttatattttcagtctcctcgaggtggactgcaggcacaccgcgccgagtggctgcgcttgctgttgtgttgtgcttctgtctcatgccggcgccgtacacgcttgtgcatgcacgaccagccctcacatatgcacttgttcacagccgcggaagtgaaaacgacaacacaagccgctctctgcgggttgtcggcaacctgtgtgtgtgtttcttaaatattaaagggggagaagcagatttccaggaacacaagaaacaattcttccatcaaatggcctgtagtccttccttattttacaactcttaaggtaaaagcaaaatattggattctcgcggttccctctgtatatttagaagtatgtatatcccgtactgctcgattttgacatgtatttttctcatttctgctgcatgtaagcatgcagattcttactacatatttgttccaatttatgggatatttttaagcttaaatttttttctagcatttgtgtgaaaggaggtgtgtctgcggcggtcttggtgctgactgcacccgcgcccctggctcctggagcctgggggcagcggcggcccccagcagccgccgagtccgcccggagctgcgggccaggagggttctccctgggagatctgctgtgtaaatgaagccagcgtcttttaccactgtttatatttctaaactgcaggttcacatactgacaatgaagaggtgaaaaggtaaagtccactgggtggtggagtactcccttatgctgaaacattcctcctcggcccagccctttcagtagagtcacagtattttaggaactttcatggggatttggaattgacactactttactacttcaaggataaacggtttaaattgctttaaattttttttaaattgttaaaatactgcaaaatgaagtctttccgtgtgacagagccttgcacttaaagtgcatatttctgtctacttatatttttttctctcaatttttcacctttatggtaccagtagaaagatttttgttttttcttttatttcaagcaatgaggcagtggggttgcttgctgtgtaactctgggcattggagaactaggaagaacctttgctgacagcctccattcagatagtgacagacgtgccccccccacccccccacccccgacactccagtcccactgcctctgtccccactgtcattcttggacatttccagtcctcctaactcttctcacctggatggtgattccaaactcccactgtccctgttaggccctgggagattgttctgctatcctcttgggctggatcacacccttgtcatcacaacagatttgtactttcttttctatgccttttaaaaatcagtgttcacctctagtttatggcctgtgaaaattatataatgctcttatcgtcatttgttaacaaaaaacaaaggcagcagaactgtagtctagcctttagtaagctttgccttctcacctccagtccaagttcatgacttaactttcatttttcattagttggttggtttgtaggtttctgcacttatttattcattcagcaaatactacttgagaaattactaggtagcagctactattctaaaagttgaggatcctgataaagaaaatagtgcctcttccattcttttatagaaccctgcatattttattataattatattccttttataaaaaatctgtgtaatatctattttcttgtctagattttaagtacttagttttatgtttttatatttttgctattccccagcacctggcatccataataagcattgtgtcattggtaatcatcttaaatcctttttattttgcaagtgcataaagttgaagctcagaaagaatgacttaagaaaatataacttgttaatggctgcagtgaaaatactacgtgggactccagtctttctgctagtctataatattttatgttaatcttacttgcctgaatttaccactttttttttttccaatccaagaagcttttattgaacaccttctgtatgcataacactttgtgagcaaacaggagatggaagcatgagtgggctacttcaagtcttagccagaaagctgtggagattaaatacgcccctatggtttctgccctctgagttcacctattctaatatagagttgctcaaccttgggagtattgaccttttggaccaattaacgctctgctgtgagaggctgtgctgtgcagtgtggggtgcttagcagcgttcctgacccctgactactgcagcctctgtcaggcctactttttaggtctttccagagcatcggggtgtcttgtctgacaggagggttctctggggcaccactttagagttttctgagagcctaacaaaggattttgcattcacactctgggttacacctttcgaccttgtttttctgtgtcttatgtttgatcttggcccagaagtagagtcttactgcttcgtgtgtggctggagagggtgagaaggagacaaggttgggcttgaaatgcctgtgtgttaagcagcccttccctctgcttcccgctttcctttgttgtaagggtcgtgaagccaggcggcagctccgcactgcctagacaggctcttgggccccatcacctgtgtattgggtacatttgcgatattccaaataaacaggctgctgtgttgctagtacccaacaagtaatctttgtctccacttttcttacgatgttttcctcactttgactttcgcccttgctggcagcctcatgggctgtctggctggctaaccgtctctctcagatcctttagtcttttcactgtggctctgtgcgacgttccagctcctgtccaggcccatagctacctctactgcatatttaaaaagaaaaaggaaacagctcagtttctattaaaagctgagttcatgatctcttgctacatatttcatagttgttggacatttgggagcagccgaggccctgggacctctgagcgtgcagtcaggcgtcagctggagccggggtggtgtggggctgctgagggctagaggacccatgtgggtctcctttgtgctgcgtaagtgtcctttctctagaggagtcttcccctaaagcaaacagcccaagaaggaaaggcagtgtgtgcaggagttggcaggtgtagttttaagccagcgcggtctcccagcttccgaagatgcccttctccgctctgtctagccggaagcggaagtgcgggcggcgcctgcggtgggatgcgctcaggagccgcccgctgtgggcgcctggcatggccgctctcccagcggccgcggctccctggagaggatgctggggcgttcagtccggcttcctgcctggaaagaggagagggcagatttggttgaatgcgggtggtgaagccgtcatcccaagcagggaggacaggaatcgaaagcagctgtcctcctttcatcccggctctctgggttgcttgatttttatttcagtttttctttaataaaacaacaaactagagtaagacattatagttattttggtgtttaatcgtattctagggagttttcatcagctcattttaaattttagatggatgctggtggtggaagttctgggtttgaagtgtggacacagcatcagttattgttcctgcaagccctccggtgcggctccatcctcctgcttggcgataaaccttcaacaagggctttgttttttccctcggggcatcttattgaatacttgcatcttcagtaattcatctgggcccagtgctttgtctgttttaatacttctaattacctaattaggtgccgtaacgcagtgacaaagccctttgtcatttcactcttgtcttaacccttttcttgcttaggaaacattccttgtgtctctttgttgtctacggaactctccatcatggatacacctcggatatttgcctggctccctttttgtctgggtcgtgaccagccaggccctgttgagatcaggtcttcccggttgactcgcatcaggaacctgggcccctggttcttggtctgaagttggggtttcgttgtcctgcctctctcacttcttgattcacccccgtgccctgcagtcacatgggaagatttccagaaagcaagtggaatagttgtcataaactgcttttgtgacataattagtgccattatcattcatagatcttaggtgtccacaggtatccatgagtaagtgtaatggaaatcaacagcattgtttgaaaattatagtgatctgtgcttcaggataactaaaaattgacaagggtcagtttttcttcatatgtgtattttagataacagtgaaagaaaacatgatagaattatagttttaccattttacaacctctgatgaatcagtctagacagtgatcatcagtcgtcacagaaagagagaaaagctaaaaatctctgcctcccgatgaaggcacccggcaccatctgtacccgttgtccacttcaaagcttaagagaacagcagaataaattttgttgataaatctctgacttgaggagggctgagcaggctgtttttctctgttccatgtggtggtagccagaccagctcaaagtttaaggatcagaaggcatgtccatctgtctggctctcgaggctggaactcggcagagacattctctggagctggagctggcacacctccccagggcctctcgtggctgcttggcttcctagcagtgtggtgtctgggttccacagctgtttgcagacagggagatggacagaagctgtgttgcagcattgctcgcgttgccatctctttgtgagaagcttgtcactgaggaccatgcctgtgcagaggggtggcgttaggctgccccaccgctgtgtgggaggagcgctgaaggattctggaacgtgcgcttgaagcgaccgtatcttccgtgaaggtccgtgtcgaaagttgaatttgaacctgttgaagtctttagacctccttactagtttatgggaatacagggagatgaggaatgtgttccataaaatggaagatcaggaagtaaaattaagaatgtgggaagtttctacagggtaaagagtttgatttttctaacaaatgcattgtaaaagagagagggagaaagaggaagggaagagaaggcaaggaaggaaagaagggacaagtcggtggaatacgtctttagagagatagcagcaaatttcagtgtacagatgcttcttggaacttgattgaaacaaactgaaaaacttttagggaaatttgaacatttgactgcatatttggtttaatcaatcgattatttttattagttacagtgttaaagtagtactgtgattgtgtttttggagtctttatattttagaaataaatgtgccctgaagtattagtgacgtctcagggttgcttcgaagcgcagtgctgagagaagagaatccatagaagggagttattagtcatgaagctgggcgactgtgctggggttcagtccattattgtctctctataaatgttggaattctctataatgaaatattttttaaacttgaagtctgtattgcctacgaatttggagttatttcaagttacaaaacaaaatgcatacaccagatgtttatacctcttggtgttaatttacagtatataaaatttgtctttaatacctacagaaatcttgagagagaaactcctatactttaaatgttgatcagttaagttgaatcagaattattacctttgtttctatcaagtaaaaatgttagatgatattagtctaaatctcatcatgaaatgctttgatattcctttctctttgcttatcagagttcatcctcacctatttaccatctctactttcttttttggctaaattcagaaattccttctcttggactctcattttctaatcataacagaatccatcttcagttcccgtttgttgtgcttcttttctcctttttctctcttttctgatggtttgacttgagtgaatcataaacttctctagttcagtcataaatttttttctctatctcatctttaatgaatttaacaccatttctctttttgcatgaaactgcaaagtcactcttgatttttcaaaatcttaataattttgatcccagcctcggtctgtattctgtgattttgctattgtttcaaaagcagatttttccttcccaatgataatttgggttagactgctgttcagattacctgccctgaatcaacaccagatgtcagggaagctattttgaagcttaaacctatcatcaaaggtgtctatcactattcctagaaaagctgctcactgcttttctccctttttatttctgattcctgtagatagaatgccttctcacttgaagcttgataatacaagaatcaagtatttttttgtaggaaatatgttattattcaggtgtattcatcaaccttatgacttgtaggttcttctgtgtaactctaaactcatgaaattttactccactgcctatctctgattcattgattagcaaggcagttgagaggtactgctactctgctcactacccaggtacactggagcaggtgttaacctctctagtttgattcttacctattaccttctgagccagattctttcagctggtaacttctgtgaatgtcagttcttccagattctgaaaatacataaacttttgtctctgtttcagaactcctctgaaatctttcacaccttacttgtttcatgctatggattcttcatcacaatatagagcatctcatacttttctgaaaaagagggtatcctgagacttcataaatgcatttcagtgttgtagactagactcgtggacagtgtgcagtcacacagctatgccctgtctgcctaatgcacattttcagttgattgggtatttgctaaaggttcagttcagttcagttgctcagtcatgtccgactctttgcaaccccatgaattgcagcacgccaggcctccctgtccatcaccatctcccggagttcactcagactcgtgtccattgagtcagtgatgccatccagccatctcatcctcagtcgtccccttctcctcctgcccccaatccctcccagcatcacagtcttttccaatgagtcaactctccgcatgaggtggccaaagtactggagtttcagcttgagcatcattccttccaaagaaatcccagggttgatctccttcagaatggactggttggatctccttgcaatccaagggactctcaagagtcttctccaacaccacagttcaaaagcatcaattctttagcactcagccttcttcacagtccaactctcacatccatacatgaccacaggaaaaactatagccttgactagatggaccttagtcagcaaagtaatgtctctgcttttcaatatgctatctaggttggtcataacttttcttccaaggagtaagcgtcttttaatttcatggctgcaatcaccatctgcagtgatcttggagcccccaaaaataaagtctgacactgtttccactgtttccgtatttgccatgatgtgatgggaccagatgccatgatcttcgttttctgaatgttgagctttaagctaactttttcactctcctctttcactttcatcaagaggctttttagttcctcttcactttctgccataagggtggtgtcatctgcatatctgaggttattgatatttctcccggcaatcttgattccagcttgtgcttcttccagcccagcatttctcattatgtactctgcatagaagttaaataagcagggtgacattatacaggcttgacgtactccttttcctatttggaaccagtctgtccttccatgtccagttctaactgttgcttcctgacctgcatacagatttctcaagaggcaggtcaggtggtctggtattcccatctctttcagaattttccacagtttattgtgatccacacagtcaaaggctttggcatagtcaataaagcagaaatagatgtttttctggaactctcttgctttttccatgatccagcagatgttggcaatttgatctctgattcctctgccttttctaaaaccagcttgaatatcaggaagttcatggttcacatattgttgaagctaaaggtgagtagtttaaattatttacctgcagtttgattcttagagatctctagtttttaatctcgtgagtggttagtatgcatttaaatgaaactgtaagttgacatgtaatataatttacatttttagtagttaggtattaaactctcatagttcatggatatttgttacaaagtgaatattgtagtttttagcactttctcccataatccattcagattgcagcatccattgggaatttggtggtccagtgtgcgtagacaatttccaaagtggtgttaaagaagcagacatagaatcactcggcaatgtgacctgtccagtcctgagataggaagcctgcttcactgcagggctagagttaagtcatccgatgagcacggagaggaaaccatttcacctcagaaggattactctgtttttactttagtgacataagtttttccagaaaacttcttctcagcattttattaactagtcacctgtctttcatcctgattactctaatttggggtatttgactttctaaagagtttagcagttttcttttgtcctaaataagtcatttaacaagctttggtatgtatctcctacttcagtttttttgacactttctggaacttctttgtcttctaagatataatattattcttgctctgactctactttcagataatttctcctctttaggaactccaacctgagtctgggctatctagagggccagcacactgagatttatgcatggatatgagataccccatggactgtttcttccaagccccagaagagaggcttccttactgcaggagaagagatcagactcctgtatctggggacaaactatatacccacaggaatttcaagccaaagtcaaatgaacaggtgaagatgaaacaggctgtaatttattataaaaattagaatcaggaaagagatgcctcacaaaccactagcgtaggccacacagggtcccagcctgaactggaaagaaagttctctcacaggggccctggagaggatcagaaggacacagaaaacagctgagctcagcagcgataggaagcggtagagtcggcaagtggctgacatggccgcgggtgtgcctctggagactcaggaggactgctcttctgatgcggcccgtgcctctgtgctctcggtctccagcctcccgcacgcactcatatcttcggtccccaagccgcctcattcacgcgtgcggcatgtcaaatgcccatcctcaggccagcagtggcctctgagctggaccgccaggcctgctcctgccgctgttgcggtgtctcacctggtcccaagagcagtgtgatcatcccacttcagagatgaggccgttaggtaactgtctactccagtcccgcagccagcagctgtgcagcaggaagctgaacccaggcccttctcaggcctgtgactctccatctcacctcagtgtaatatcctcctctccttcctctaaacctctcctcttgcagtctttttgccaaattagagtccctccagtactctcttctttccttttggcttcagaaacgtagagtcatctgttgctctccccccgccgtaatgctgccttggaagctcctgtgtgcctcccgcctttcgtccaccctgtcatcctgccccagccggtggcacctcctggaagcacgtgccctctgtgtcactagcaccacgctcggaatcgagcccgcacggctttccttctgatggggtgacctttcccacagatgatctgtgttcctcttctaaaaattctcgttcagaccttttgtgattgaacccatttgactgcttatttctgtgtgatgttaggaagccttctaatcccattcttttacccatgctgctgctgctgctaagtcgcttcagccatatccgactctgtgcgaccccatagacggcagcccaccaggctccccactgggattctccaggcaagaacactggagtgggttgccatttccttctccaatgcatgaaattggaaagtgaaaattgaaagtcaagtcgctcagtcgtgtccgactcttagtgactccatggactgcagcctaccaggctcctccatccatggggttttccaggcaagagtactggagtggggtgccattgccttctccatcttttacccatagctgtccggtattcccagcaccacttattgaagaggctgtcttttcttcattgtatattcttgccttcttcatcaaagataagatgcccataggtgtgtaagtttatctctgggctttctgtcttgttccattggtctatatttctggttttgtgctggtgccgtcctgtgactgtagctttgtagtatagtctgaagtcaggaaggttgattcctccagctctgtttttctttgtcaagatttctttggctattcagcatcttttgtgtttccatccaagttgcaaatttttttgttcccagttcagctcagtcatgtctgactctttgcaaccccatggactgcagcacaccaggcctccctgtccgtcagcaactcccggaatttacccaaacttacgtccattgagttggtgatgccatccaaccatctttttgttcgagttttgtgaaaaatatcactggtagttttataaggattgcactgactctgtagactgctttgggtgatagcgtcattttcccaatactggttcttccaatccaggaacctggagtctctccatctgtttgtgtcaactttgattccttcatcagttttctgcatacaggtcttttgtctcgtcaggtggtttatccctaggtattttatgcttttcattgcaatggtaaatggaattgtttttttaacttctctgttgtttcactgtcagtgtgtatgaatgcaagggatatctgtattacttctattatatcctgactgattatttttggatgacattcattcttaaagggtcatctcttggtattcatgagggatggagtctgggacttccacagataccaaaatccatggatcgtttaaccctcttgtatagaatgcagtaatattcacaaatataacctatgcctatcctcacataaatcatctctagatttctaatagctaatacagtgtaaatacttgtgtaaatagttgctggcaggctggcacgttcaagttttgctttttggaactttctaaaatttgtttttcctaaacatctttgatccatggttggttgaatctgcagattcgaaagccacgtatccactgggctgagagattcattgtgtattgcagtcctctgtatttgctctttgggttattgccatctttcattataaacaactatttaagctcctttcaggtgaatactctgccctttttatttccgactacctcaaagcacctggtagaatttttgatccagagatcatttaaacagtattgactaactcattccatttaaagtggtgttttaatcaaataaaactaatggtgtggtaatgtataataatttaaattctgatatttgcatgaaaaaaaagataatgattttttcacagagttggtatttacaaaatcacgttacaccaaatgggattaaacaaagcagcccccccaccaacagactgaacctcatacaaaatcacgttacaccaaatgggattaaacaaagcagcccccccaccaacagactgagcctcagttgcttaaaaacggtttattcctcatgtgatgatcttaagcatacgaagacgtttgaagtgtttaggtgtcaaaggtatcccttccctgtgtgatacagtaatctcccttttctcatcctttttttctttaacacatcagtcccacctctggcataagttacatggcaaataaagacttgtactaaaaccaaaagccgcccttggcacctctcagagatgaaagtttgagggtaattcttgaaattgtgttactcaatttcagtcctctgttttcttttttcaggtttcctgaaatgcagtttttccaacaagaaagtgtgagaaaaattcttacagatgttcttttctgttatgctagagaaaacgagcagttgctttataaacaggtaatgaaaatatcgtacaggtggcatccattgactcagaattttctatacagcttgacaaatgatagagcaataatgtagcctttattgtatccaaagttgtatcataatagtaaagcaatcaaagagctgcttgtcagctgcacggtgagaaaagtaagctcgctagcgcacatatgcttcttccttattataagacattccgccaaattgtcttctataaggcattcaatctcttctttcaacttttgggagtttgtttataaacagcatctttgaaggcaatctagtaataaaacttttcagagttgtatacataaatattgtttctaagcacaacatttataaatgcatgacatgccatgaggaggtgatcaagtgtccttttactctttaaaatctaccaataatataacttcagaaagttcctttaaacttcctggaagttatgtgatattcttgggatcttgatgtttaattcatctcataattaaagaaggttattgggttatgtgtattcattttgaaatgtaaattatttaatatataaagaagtatccatgtttctacttaagctaatgggcttccaataaaaatacacatagttagatactttaatgtatctcaaaatacatgttaagtgaggattcaaactattaataaattctctgacaatccaaagttgttatgtccactgctgaccacccaaattcagtgtaacagaaaacacccgcatggtgagagcagtgtatttataatttgagataaacttgatttatttaaagataataaaccaagtcatattgcagttgtcctaaataatacatttgttattctctacatggaaatatgcaaaagaactaattttattttagttttaatattactaatatatattttatattaattacatggtggtaatgagcttttaaaatgggaaatggaaaaaacgtatcctgttcttaatggcaaccaaaactataaaatgtctaggaataaattgaataatataagaataaaagctatataaagaaaactgtaaatgttatagaaggatataaaggtagagttgaataaatagaaaagtgacaacatgtttctaggtgggaagatactaagtaaaggtactatttcttcctaaattaacatataaatgtgttatcattccactgataggctaagtgagagagagatagtttttttaaaactggacacagttattttaaatttagtgcccaaaagctttatagtaattttaatggcaagaaagaacatagcttactggttgcgagcactgggtctagactctgattccttcatttgtgtctcagctctaacacttcttagacaacacatagacttgcctcttctgatcttaaagctttgctgatgagggcagtgctctgtagagttaaaagcatgtagtgctccttatgacttcatgttggtagttaccgtggtgatcatggttacagtcattagtaaatttgcttaagttgccacagaatttaggggaaggggagaatgacctaagaagacatgaaaactgttataaatgttacgtgatgaagccagtgtgacagtagtgtggaaaccgagagagagatcagtggagaaaggtaagaacaggtccaatcataagtgagagcttcatgtaagatatagggcatttccattcaaggggagaaggacatcgaattgctgtatttgactttccatctagaaatgattaaattaaaggtataattgtaagaactaaaactacataaaaattctgggaaaaaagaaacatttaggagaattttttgataacctcagggtagaaaaggccttccctagcaagatatgctgtccagatcagacccaaagtgcagaaaccagcagcaaaccagaaaggagacagggagaaaataaacctccatctgtgtaagattttttggaagccagtaaaagaaaattctagtaagactgacttaaaatctaagcaagttactaacacacttgcaagaagtcgtcaggcgcaggctcttcgccagtgatcctagtttgttcccgttgttctgttctctgtctcattttgttgccttttgtcgtcaagcctgtctcctccgtcttctctctcctctttgaaatatctgggagtatctcatgatgaaaaatctgatgataaccaatgaggttagaatataattatgccaagttatacgtttgtttgccctttttctttagagaaagaaacaactagattcacggacaagggaaaaaaacaacacattgtaattgcgtggtccaccgtttgtgaggcacgcagcacgctcgtttgtgaggaaggctaaagagaagcggggcagaccagacacgcttgataacttagacaaagcctatcggtcaccgagcaggaaactattattaacttactgctgagcatcaccttctaagactgaaaattactccctatacatgttaaagattctatagattctatagatgtagaaataatcccttactctaagaggattggatatttagccagatcaaatttaagaaaaaaccttgagtttcatcacaagctgttaaagctattattttgtactaggtgacaccccgtttaacatcgaccatattgttaatagttatgggattttattgaattaatgagactgttatcatgtagtagaatgtcttgctgagttaattgaaactgcagagattatataaatggtattaatgaactttgactgcctgatgcctcagctttaataaagactgcttggtgggctaaatgaacacaggcagataaaagaacaggttcaatttggtgagcctacaggctgttgatgaggaaaacttcgttaccttcattttgaactgacatgagtttggagagcagtgactgctgaggatccagcggtgagcaaggctgtaagcaagcagaaacactgacgtgcggatggaagcaaaacacacattgtggaagccaagagtatgctgatgacacatttcttttctgttacgttttatcagatttacagcacattgcatttattatcattctttccagatctcttttcatttaaagatgtctatttggttgtcaattgtaattaataatcaggttttactagtatagaactgagagtaagagcaacaattttttccaagtctgttttagaaaaacgtacctagtttagttggatgtgaaccctgaatgtgtaaaaggctgtcttagtggtattcaggggattctgaattttacaattttgcattgtacaaaaagcattctttaattgacgggaagtactgaagtataactcagtccagttcctttccagtttcaccatattgtagctttcaccagtgtgttgctaaatgcagtgtgtgcccctctagtgggggctgctccactcatccagtcactatgcagtgagcaccggtgtatgccgagcacatagtaggagctgggttttcctaggtatgcacggaggcacatacgcatgtacgtagacatatatgcatcacttgccaagtttatcaccacaaagtacttccgtactcatttgatcgtgtgtcttgctgtccagatcacaggctccataatggttgggaggtgctcactccattcattttcgtgttctcaatacatcataggtagttaatggataatttttggaataaataaaagtaaatgatgtatgggcaaatgtagactctggagagaggtcacagaaagtggagggaagagaacattcaaagaaagtgagaagatgcatttaggcaagagctgtttcttactagaccatccatacatagttttaggaaacactgaagggaaacgttccagtccgaagaccactgacaccgccaccaacagcgaaaacctcgtaaccagcctaagaaaaactatgcagctttattacatatttttgaactggaaaatctggtgttcttagaaatatctattctatttaagttaatacaatcacagtaaaaaatagtttttgtctagcattttctgtaactaattacattttcatttggatgaaaaaagttattagaataggcaaaacagctttgaggaaaacaatagaaaatatggggaaatggagtattgtgcagctcaaatcgtgacagtagtaaagttcttgttaagaatgtataaattagtagaataccagtaaaaacaaactgagaaaaaatgaaagccaaagattcagtttatgataaagatgacatttcagaactcttgtgaaaagatggattattcagtagatgaggattactcaataaattagtttaactcttagggagaagaaaatgcatatttattcttcagggcaaaaacaaattccagatgggtaaagaattagctgtaaaaaaggaacttgtaatttaacttaatctcaatatgatgaaggtttctttcgcatgaaagcaaaagaaattataaaagatgatttattgatttgactaaagtatatggtttcactttgacatgagatatcatcaaaattaaaaggcaagttataaacatgggaaagtatttgtaacaaaaatgactaagggtagggaaaaggaaactcttcattaagcgaaaaacgggcaattcattaaataaaaatggccactaaaacgtttgtgttcaatctcactagcatttaagtaagttaaaacaactgtttgtaaaacttgatgggatctttttaaaaaacactacaaataaagatgagagtgtatgaaatggtttggggagtttcatgtcttaaagtggggatcatttctaaagggcagattaattgtatatatcaaatatcttaactcgtttacccagaaatttttcttctagggagtttatcccaaggaaaccaccagaaataagcaaaaacattactcaaggacgtctgtcacaggtttcctttcttttttggacttctctccttgcttttttggccttccctcctgtcttttttgttgtttttgtttgtttgcttttgcttttctgtagttctctacaataagcacctcttactttcatgattaaaagtatgtcactcagttttttgaataatttgagattattccagaataataagcccctggtaatatttttaaaccactttagcaacacttcattctttctgagtctaccaagttcttctaaggagcagtcttttcaagatttgtttagtaggtgatgtttacctaaaaagattgaagtgatgtgtggtaatttgtcctaaatcacaagtaaaatgtcagtgggtcctaaattattttgtaagaatgtcattaagcctttctaattccaggctggtgaagacttgtcagtgaactctgacagagtttccttgtgggttacttagtagcacagagctgctagactggttgcagaggactgtgtggctgtccctcacaggaggtttctttaatcctgttagcaaagagaggagattttattgttatttcctgaaaaggtggggttttgtgttgtcttttttcaagagatcatcttagataaaaggaaaatagtaattgactcactttaaaaggcagaaaagagtataatctatttttaacttgctaaaatatgcttttgatacctaagtagggaaaaaaaatctcaactgatctggaatatcttattttttcacaataatgggtaaataatggatttttataataacctttgaaaggcaacttagtaattaatgcctttttgtttctatttatgtaatccatagatgaatacaatgtaaggacaaaggaaattatattggtgaaatcactaaataaattgaaaagtaaccatatagttaaaataggaaaaagaattatggctatcttggcttaaacacctttaaaatttttactttgaaaactttgtttctcttcatacctgctaaagattatttcctttattatccaacatttccagctagctgacttcagctcttcctaaatctacagacatcctaattttgagccattatataatgaaaacattggatgtaatttccttaggtcttcagttcttagttgcccttcttactacagatctttacactgtagctcatgattataatttgcataaatgaaattcatatttatgagtacagattctgaagcaactgacaggtgcaaggttgtctaccatgccaatttattgtttgttgtgttattcaaaagagagctgctctccatgttttaaagaagaatacgtgctgtggttgaattggaagtcagattctaaaactaaatctccttttgtagttttttatgtttttgcttctgtgtataatatggaaattctggcggtgggggtcagctgcagggctctcagctgagccagttctgtccactggtgaatcctcagcatccgccccctcctttctctgttccagggaatgcacgagctgctggctcctatcgtcttcaccctccactgtgaccaccaggcctttctccatgccagtgagtctgcgcagccaaggcaagtttttatgggagctccatctatttttcagccctgttgtaatctttttttttaacctcaacaccttttacattgaagattttgtaaattgtaagcatttgtttgtggttcatgtgtctgaaccacttagtaattgtaatcctacttcagctatggggaaacttggaattctaaatatttttcaagtcttagagctataccaaaggaagacatatatctaacgaatcaggaagagatttttgttgcaatggtgaagtgctaacagttgttaatattcatacattccatcatacagtgacccgttctctcacactaagctgtaagagaacctattctgagacgtattttgtcctccccagatccagctcaattcagttcataaacagaatagtttaacagagaaccccaatttaaagaaatacaaatgacttcccatgttttttagatacattattatttccagcaaataacttcagtaattatatttaacttgggctgattgttagaatttattttctaacttaagataccctcactaggtgggcaggagaagcagccaggaggcgtcttgggaatggagagcctaggggctggaaaccatcaggagcgttcgcaggctggcccctctctgtgcaggaaacagagaatcagcatgtaccatttcacctgtctgtgcatacagtctttgttaatcgaaagcagccatccgtttcgctgaacacgtatcagggcatttgtcaaatcccctctagtttactatattttagggtcgtattttctagctccttggagtttttccagttacactggctgtattggagaacttcttgaatctgactataataactgtgtcttaattgcctttgcctcagttagcctaaagtatgatgaggatgcagttagtgttgagaccctcttctcagggcagttctatcttttaaaaaatgtacatgcagaccatacttcataggaaagcgcacatgatggagagtagctttttaaagaagagcttttaaatgagttgggcatgcttctttaagagtttgaatcctctataaagaaaaagcagcactaaaatagatttggaggaggtcactgattgatactaaaacatgttaaaagtagaagccactgaaggaaaataaatcaatgttttgatatgggatctatgaccagtaattacatattttcttgtttcatttggataagtgatagattgtggagcaatcagttgattctagatcaggcacattcaaagaatgtattgtcacatccagcatttgttatttggaataattagatagttacatcactgtggtagagacagggaactaatttgttttcgatctttgtagaaagaaacatttcatatgttaatagagttgctctttttatttaaaaaaggctcatgttttttcctttacacattatgtgaaagctggcttagagtatagataaggcagcctctgtgtctctctctattaaaaaattacacattctgatcgcttgcattgctgttttaagtgaggaaatgaagactctcctgaaccctgaatatctggaacacgatgcctagtaagtacaaaaacttttcggtcatttttattttttatgctatttttaccttaatgaagatttaacattagcattatattgtttttctgatttttagtgcaatgttctcacagcttatggaaactgctgaaccttggttttctacttttgagcatgatggtcaaaaggtaattatagtacaaatatttgcaatgtatttgagggaacaaatgatttcagtaaataaaagtgtaaaatcagagaccaaagcagttattatcactataaaaacaacaatataaaaatgcctgtgaaataagtttgaactggggttctaaatcatgcctctaattattgacagattgacaagggtaatataaaaatttttgtgtaaataaaatagaaactttcttttatatgtgtgtataaattatgcatgcaatataatttcttaaaaattgcttaaaaattttgaatgagaagtgtattaatctacttgatctcttctgtgaatagacaggccctgaagtatgtaggtaaactgtatcaagtaggttgttttatcaatgcatcactaaagtgaattgatatgtttagtggcaataatatttatcctttctctcacctttattctttaagtgttttttgtgaaatgacataccacagtattcacctttttaaatgtacaatttagaggtttttaatagattcacagtgttggtgcgtgcatctctactttctaatttcaaaacatttcagcacctaggaggaaaccctgtcccactagcagtcacccctcatttcccctccccagaacatcgggcatcactagtgtatcctctgcttctttgaacttgctattctggaccttgcacgtaaatggaatcgtacaatatgtgacctttgtgcctggctgttttgacttgtagcatgtgtcagtagttcatcccttttcatggctgaataatgtttccttgcatacatatatgtcacattttatttttccatacgtcagttggtagacatttgggttcttttcactttctaactattaaaaataatgttgctctgaacatttgtgtacaaactttttctgaacatatgttttcatttttcttggcatatctctaggagtggaattgccaaattaactgtcattttaaacaaatatatatgctaacttagggatcattctggccttttcattgttattgcacaatattgggaaaattgcagattattcggacagggtctgttgtgttaagagttctgggtatattattttctctgtgactaatttcttttatattagtataattgaatgcgttctggttagaaactgtgtatcactcagttctttcactttatctcttggccaatgagatagataactaatgctttttatgcctttggtcgaggtcaggacgaactactgcctgcaggccaatttggcctgccatctgtttttgtacagcttgtgagttaaaaatggttttacattattaaatgattgaaaaaatatcagaagaaaaataatattttgtgacatgtaaattacagggaactcaaatttccatgtccataaaaaagtttttttgggataccgccatccctatttgtttacatactgtcttcagctgctttctcattacaaaggcagagctgggtgattgcagcacagactgtgtggcttggaaagcctcaaacatttaccatttttgcagagaaagtttgtcaagtcctagcctaagtgataaagtcttcctccagcaatgtatcaccatgctctattctgtaaggattattagagggaaagcgtcctgtaagcacatgtgataaacagtgtattttcagcaggtgatttggtaaagacatagatttaacatgaaccctcagattttgagcagaatatttgaatatattttattagaggcctcatgatcattttacacagtggtcattgtgtgttttataactgattcagagtatctgagaagctgaacgataaaatgtgagcgctgccactttttacttttacttatccacattgctttcactgaatcataggaaaacggctgctgctgctgctgctaagtcgcttcagtcgtgtctgactctgtgcgaccccatagacggcagcccaccaggctcccccatccctgggattctccaggcaagaacactggagtggggtgccatttccttctccagtgaatgaaagtgaaaagtgaaagggaagtcgctcagtcgtgtccgactcttagcgaccccatggactgcagcccaccaggctcctccgtccatggatgttccaggcaacagtactggagtggggtgccattgccttctaagactacacaaagacacttgatcagagaacacatggacatgccctctgagaatctgtgtccattacttgtgtgtatcagtgcctcctgtgtccctaaaaagcatatctcatgactccctttgcatcctaccttttgtcttctgtttcatgattctgtcatcttttaaagaagaagtttgataagttattatatccctctatcaggtcttctaattccatggaaagttcagccatatcgcggtgcctgccgcctcgttcagtagcgctcctttcacaagccttccgtgatgacggaggcaatctgctggtttcatagtggtgtgaagtcgctgtctcactgtgtccctcactttgtgtcctggcactcatctgcaaaacccactgtgcctgccactgagaagtggttagaaagttctctagttctgttggtagttgtgtttgtctcatcaaatgagatgaggcaatcacagctttatgttaaatgtaggtagcattctttatcgtaagaaatcctgaagattagtgtttttcattaactctatctttattgtttcaattttcctattagatatgctatgctgtttagcatttaaatgaccagagagattgctttcaagatttttaaatttaagagattttattatcttaggttggtgcaaatgtaattgcggtttctaactggcaattttaaatcattataattagggtcaaacacaactttattcaatcaacacatctttgccaacaagaaatgtttgtttatttctgaagcataaaaatccataccttgggattcagcaaactcttagaaagcattttctgccttctgctggttgtggaagcattttccttgcaaaaaattgctgagatggttgatgaagtggtagtctgttggtgagaggtcaagtgaatatggtgggtgaggcaaaagttcctagtccaattcattccacttttgaagcgctggttgtatggcatgcagttgggcatggtcaaggagaagaattgggccctttctgttgactagtactggctgcaggcgttgcaatttttggtgcatctcattgatttactgagcatacttctcagatataatgattgcaccaggattcaaaaagctgtagtgggtcagactggcagcagaccaccaaacagcggccatgaccgtttttggtgcaggtttggcttaggagagcgcttggggcttcttctcgatccagccactgagctggtcatcactggtggtcatataaagtacactttttttctcagaaatggtttgttgttccatagaaaaaaaaaaagacgacacttcaaagcaatggattttttttgatttgtggaccactgataaggcacccagagaaggcaacggcaccccactccagtactcttgcctggaaaatcccatggacagaggagcctcatgggctgcagtccatggggtcgctaggagtcggacacgactgagcaacttcactttcacttttcactttcatgcattggagaaggaaatggcaacccactccagtgttcttgcctggagaatcccagggacggggaagcctggtgggcttccgtctatggggtcgcacagagtcagacacgactgaagcgacttagcagcagcagcagataaggcacctggacttcccaggtggcagtagtggtaaagaacccgcttgccagtgctggagacgcaagagaaatgggctggctggtcattgttaacttctgatggccagccagtatgccctcatcatcaaggctctcatctcctctgcaaaacttcttgaaccaccactgtgctgtatgttcattcgcagttcctgggccaaatgcactgttgatgctgtgagttgtcttcactgctttacaactccttttgaactcaaataagagaatcgatcagatttgtgttttgtcttaacatcatttccatgtgtgtgtgctcagtggtgtctgattctttgtggccccgtggactgtagtctaccaggctcctctgtccatgggattttctaggcaagaaaacgggagcaggttgccatcatctccagaggatggatcttcccgacccagggattgaacccgggtatcttgcgtctcctgcactggcagatggattctttaccactagcaccacctgtgaagtccttactcctatcatttgcttagtctaaaatgaaataaatgtaaatacccagcaattagtgacattagcataaaaacataaagtgaaaaagacacactaaaataatgtataccataaccatatttatttaaatacatatcaaatggcaaagttcaataatgcaaaactgtgaatacttttgcaccaacttaatgaagtattctgttaggggaaatctttttaagttaaagcatcctgttatttgaagagagtatactagatgctacaaaatcagaaaaaagataattggatatactatttttgtagtaaatgatggcaatatggaggtttccatttctcttttatatataaattagcaacgagttgagctctaaatattaatgtagtcttctgacctttggacctaagtacactagagcaggcactgtagaaagtccaaagggctgtgtttcattttaagactggaaatgatgctgggcagccaggtggaaccccttcccataaacctcctctgcccttaacaagcgccccccctcctctctcctgagctttctgccaccctgcctagtcacgactctagggtgaatttccaggctttttttctgtgtagttctttcttccaaatggtacaggcaagagctttaccttctttatgttgctgaatctggtccagtgacaaaaagctgatactccttttggagatctcacagtttaggagacagagaagtagcaaagcagggaagatggactgaactgggactggacacttgagccaaatctgacagcacacgtggggaaaacacgtcaggggaaacactgggagggatgcttcacgtagagaatggcagaccagggtttctgcaagcacagtgagagcaggctgaccacgtgagggaaagactgcccacctggctaaagaatttggattgttttgtttttcctggagtgaaaataatgaagccctcttaaaaatgtctaaggagggactctgccatcttgtgacttgtatgaaaaggcaaaaagataggaccttgaaagataaactcgccaggtcagtaggtgcccagtatgctactagagaagagtggagaaataagtccagaaagaatgaagaggctgagccaaagtaaaaacaacgcccagttgtggatgtgtctagtgatgggagtgaagtctgatgctgtaaagaacaatgttgcataggaacctggaatgttaggtctatgaatcaaggtaaattgaagtggtcaaacaggagatggcaagagtgaacatgaacattttaggaatcagtgaactaaaatggattgaaatgggcaaatttaattcagatgaccattacagctacaactgtgggcaagaatcccacagaagaaatggggtagccttcatagtcaacagaagagtctgaaatgcagtacttgggtgcagtctcaaaaacaacagaatgatctctgtttatttccaaggcaagtcattcaacataacagtagccccaaccactaatgccaagaagctgaagttgaatggttctatgaagacctacaggtgtccggtggctcagacggtaaagcgtctgcctacaacacgagagacctgggttcaatccctgggttgggaagatctcctggagaaggaaacagtgacccactccagtattcttgcctggaaaatcccatggacggaggaacctcgtaggctatagtccatggggtcgcaaagagtcggacacagcaagaccttctaaaactaacacccaaaaaagatgtcctttgcatcactggagactagaatgcaaaagtagggagtcaagagatacctggagtaacaggcaaatttggcctgggagtacaaaatgaagcagggcaaaggataacagagttttgccaagagaacacactggtcatggcaaacactctcttctaacaacaggagaagactctacacatggacatcaccaggtggtcaataccaaaatcagattgattatattctttgcagctgaatatggagaagctctactgctgttgctgctgctaagttgcgccagccgtgtctgactctctgcgaccccatagacggcagcccaccaggctcctccgtccctgggattctccaggcaagagtactggagtgggctgccattgccttcttcagaagctctgttcagtcagtgaaaacaagacagggagctgactgtggctcagttcatgaactccatattgcaaaacccagagttaaattgaagagtgtaggaaaaaccactagaccattcatgtaagacctaaatcaaatcccttatgattatgcagtaaaaatgacaaattcaggggattagatctgatagatgagtgcctaaagaactatagacgaagatttttaacagcgatcaaaaccatccccaagaaaaagaaatgcaaaaaggcaaaattgtagtctgaggagggcttttaaagagccgtgaaaagaagagaagctaaagacaaaggagaaaagaaaagatatatccatctgaatgcagagttctaaagaatggcaaggagagataagaaagccttcctcagtgatcaacgccaagtaatagaggaaaacaatagaaaagaatggcaaggagagataagaaagccttcctcagtgatcaacgccaagtaatagaagaaaacaatagaatcggaaagactagagatctctccaagaaaattaaaatagctagggaacatttcatgcaaagatgggcacaataaaggatagaaatgatatggacctcacagaaacagaagataagaagaggtgacaagaatgcacagaagaactgtacaaaaaagatcttaatgactcagataaccatcatggtgtgatcactcaccgagagccagacatcctggagtgaaaatcaagtggaccttaggaagcatcactacaaacagagtgagtggaggtgatgggactccagttgagctatttcagattctaaaaaatgatgctgtgaaagtgctgcactcagtatgccagcaaattgggaaaattcagaaagccacccagaaaaggtcagttttcattccagttccaaagaagggcaatgccaaagaatgttctaactaccacacagctgcactcatctcacacgctagcaaagtaatgctcaaacttctccaagccaggcttcaacagtatgtgaaccaagaacttccagatgttcaagctggatttagaaaaggcagaggaaccagagatcaaattgccaacatctactgaatcacagaaaaagcaagagaattccagtaaaatatgtacttttgcttcattgactttgctaaagcctttgagtatgtggatcacatcaaactgtggaaaattcctaaagagatgagaataccagacctccttacctgcctcctgagaaatctgtatgcaggtcaagaagcaacagttagaaccggacatggaacagagactggttcaaaattgagaaaggagtacgtcaaggctgtatattgtcaccctgctcatttaacttctatgcagagtacatcatgcaaaatgccacactggatgaagcacaagctggaattaagattgccgggagaaacagcaatgacctcacatatgtagatgccaccacccttatggcagaaagcgaagaggaactaaggagtctcttgatgagggtgaaagaggagagtgaaaaagctggcttaaagctcaacattcaagaactaaggtcatggcattcagtcccgtcacttcatggaaaatagatggggaaaaatggaaacagtgacagactttattttggggggctgatttttggggcctcaaaatcacagcagatggtgactacagccatgaaattaaaagattcttgctccttgaaagcaaagctatgacaaacctagatagcatattaaatagcagagacattactttgctgacaaaggtccgtctagttaaggctatggtttctccagtagtcatgtgtgaatgtgagagttggaccataaagaaaggtgattgccaaagaattgatgcttttgaactgtgttgttggaaaagactcttgagaatcccttggactgcaaggagatccaaccagcccatcctaaaagagaccagtcctgaatattcattggaaggactgatggtgaagctgaagttccggtacgttggccccctgatgcgaagagcagactcactggaaaggaccctgatgctgggaaggattgaaggcaggcaaggtgggcaacagagaaagaggtgattggatgttattaccagttcaatgacatgagtttgagtgagctctgggagttgctgacggacagggaggcttggcgtgctgcggtccatggggtcgcaaagcgctggacacgacggagcgactgcactgaactgaaggagtgacttcccttgtgatccaggaatcaggactccatgctcccgccccaggggcgtgggcttgatccctgactgaggagtgagctcccacacgcagcaaggcattaccaaagagggaaaaaagaattaaaagtataaggaaggtgatgtggtacaatctaatacctgggttagatagattaccagacagtgtgcaagatggatttaaagcaggagggaaggagtaattcggtccccaaatcaggttgttccaggcagagaagcagcatatacagaagtcccctgagtggttctgaggagctaaaattggtgaactgggtgttcttactggaggatgtgttgctttaggcgtgggaaagcatgaacaagtgtgtgagcggatgattagcaccgatgtgggcctgctggatttgaaacctttgggctgtctaacattcttcaccaacattggagcctatggcaggtggcctagagttctagatatgaatacatattagaaagtctttgctaaaagaattttgactgtagcactgtgaatgactaagctcactcggggaactgtatataagtaggggttcagctgacaccagaaccatgtggaaaagcagcttttgcgaaatagagcgaacaacgtagctcgagaaggagcctgaggatgagcaacaggcggccattgagagaggagctcagccgcagagaggcagagcttggggactgaacgtcagaagaaaggccaggcgtagaacattcgggcatatcatcaggactgatgcgggggctgaagctccaatgctgtgggcgcctgatgccaagaactgactcactggaaaagaccctgatgctcggaaagactgaaggcgggaggagaaggggacgccagaggctgagatgggtggatggcatcactgacttgatggatatgagtttgagtaaactccgggagttggtgatggacagggaggcctggcgtgctgcagtccatgggttgcagagagtcagacagactgcgcaactgaactgacttgactgatcatcagacttgagggggtagctaaagttgacatgaaagcattacacagagttagagatctgtctttcttagtacagggtatggggtggcaggaagggaagttgtactgccagtgtagattttttttaaatcagctacacttttgatctggagaatttaaaaatctttctacctagctgttttttttttttttttttaatctatttttaactggagggtacctaccctacagtggtgtgctggtctctgccacacaaaagcgtatacatgccccctgcatcgtgactctcctgccctcacctgtcaccccttcccatcctctaggttgtcacagagcactgtctgcccagctgttgaaattgatcaatggacattcagagaaagccttctattttagtattagtgtactttatttcttgactttttgtttgtttcttttaagagctcaaagtaagacagttttcaattactgttttgtttttttttcatgtttaattcttgtgccacaagaagcacgtttccctcagagtattcatttaggtgctgtgactgctgaggcacgctggctacacacagactgtatagaagacctctagccaaaactgtccttaaagactgtcgctgaagaaactggtcaagggaacacaactagaacagattttagaagctttttcctggcctttactttatgagcacaggcatttatgtggcaatcagtttgttattccacatttgaagcgtttgtcctgagttggttaaagtagttgctggttcttctttaagcttccattgataaatactttaaagagtcatggccttatatttgttaatttcatcctgaaataatacctgttccatttttcctgtgtttaggggaaagaaaccctgatgcctcctatcccctttgctagaccacaggatttggggccaacaattgccattgttactaaagtcaaccagatccaggatcagctactgaagaagcatgacattgagctttacatgcacctgaacagactagaaattgcgccacagatctatgggttgtaagtattcagtttaaattgcggcagcaccacattctgactcacagtggtttctgtatgctctggactcgtggaagcaggagtgagcaccgtcccggcggtggttctttcattttgcctttgtgttctgagagccagtcactgtgctcactgctttcatacgccgtctttcatccaatattaccctttcttacaaagggagaagctgagacgtacagtaaagctgttagtcactcagtcgtggccaacactttgcaaccccatggactatagcccaccaggctctcctgtccatggaattcttgaggcaagaatactgaagtgggttgccattccctcctacaagggatcttcccatcccagggatcgaacctgggtctcctgcattgcaggcagattctttactatctgagccaccagggaagcctgaggtttacaataaccttacacatactgaacagtgaaatcataattcagtccagatggaactggatccataatctgcaaagcccagtgcaaaataaaaataaatggctctttaaaaaaatgagtgggaatctcaagatggcaacagcagatcattaaaccaagccttctgagaagtgcagagtcacacagattctatacatgtgaagcagcccagtacccagacagtcctgtaatatattcacgttcttgccgctttataatgtgcttatctgctctaccctttggagtgcatttctaaaagtaagatgaatgtctctcacagtaaaaataatatattaaccttctttagctggatgatttctgtaacatactgtagcaggagaatatggagccagtcacccttaggtgtatatgagcgtgtgtgtgtgtgtgtgtgtgtgcattcaataacttataatgtgagtgtgcaaatcagcaactttaataaatatgaattagttgtgtagtgctacagacagcgaaaggatcttttagattcagatgatacggcattcatatctaatgttgggcgttcccttggtagatgtttcttgcagatcacatctttcaactagatcgaaaatggaaaattgagaaggttttctgagatacacataatagatttgcagtgaatatgagttcattatttcaattaggaagaacctcaagtcataggttttgaaccagagcagaagccatttatttagagcaaaggaaagcatgtcagtgagcgttttcttcatgtccgtgtggcacagtctgacactagtgactgctgcttagctgctctcctcctgaagccctgagctctgactgacaccctccacactcctgtttcagtgatactcgtttgcatttttgtgacttaagcttgacttcatcactgagagtcgctccgtcattcccagtgggagggagaaagctgtgggaatcatgggtcttgggcagcactgtaaatactgtcacactggcatttactccactttcaagtctggctaacatatgtgtgattatagaataaaactctgtggcaaactaccaggtggccaggtcaggaggcagattctgtgttctttccgctttgtgctgctctagtgttcctgcctgggaaaccccacggacagagcagcctggagggctacagtccacgggctcacaaaagactcagacacgaggtagcagcgaaactacagcaatgcactcaaacagctggtttattcaaacacagaaaatggtttgatagcttcaaaaactgttttctggtctagaaatttgtcttaaatattggagaaagaaactaatgccagacacatttctcacgtcttggaaatgctctcttgtttgctacctctttggccgagctggtgccttacattgtggtggtcgtggcatggacttgggtacggtgatttttagccagtgtgttcaggtttccttatcagacattagttcccatctgctttctcttcataatgacccatagaacttctttcacatccaaccagcaccttcccaataaaattctgtgatccctgacgtaattactcttaatcttttccacttcattttttagcagtactaacaaaatcagggcttgcagtaacagtagctgactcagttatccctttatttttgtatagatgtattattttaaaatacacaatttttcatccttgaagaaatcactcattctcttaattgttctgtatgacattctgtagtgcaaggattttacttacttatatcacttattaaatttgatttcataatttcttttggtgaggcaatgtggttgagttgccctatgcctttatgctaccctaagctgtgccactcatctgtgtatttcctactgaagactgtcagaacgggcacaaaggatactatgagtgtgatgtgaaatggcagttagaagcagaggcttcgaaacgatgcagacttgtttaaccactctgagctttggtttcttcatctgtgaaatggaaatgaaaaatagtggtacgtacttcatggagtgcctatgaaagttaaatcataatatataaaaatcatagtgttcagtaggggataaacattgagtatatggtgagcactgctttcgttttcattatctgccattgtcgttgcagacttaagatatcatggccctgtcagcatgacgtaccctgtgatttgtgagctcttctagctctgactttggctttctgtgttttcttcaataaagcatccaagcttctacttaagtggaatcataatagctatcctttgtaggggtgcttctcaagaaatagtacagaattgaagagtaaacttttagaaacattatagcagtttgacagaataattttatgtccttgaacctaataaatgttgtaggttttatttcatggaaataaattaaaattattagttttgttttagatcatacaggtaatattaatctaaataactgctgatgctcctatatgttgctcttgggagaaagttgtttacaaggtggagaaaaggttatttagcaaaatgaaactatatcctgtattgagtccaggtttctaattttagtcagtcttagcagtggcatcccactccagtactcttgcctggaaaatcccatggacagaggagcctcgtaggctgtggtccatggggtcgtgaagagttggacacgactgagcgacttccatttcacttttcactttcatgcgttggagaaggaaatggcaaccccctccagcgttcttgcctggagaatcccagggacgggagagcctggtgggctgccgtctgtggggtcgcacagagttggacacaactaaagtgacttagcagcagcagcagcagttgcatggtacattaaaatctaattaaatctgctttctgatatggttgtggttatctttaagacaaagatttgggacttccctggggtcctgtagctaagactccacgctcccaattcaggggcctgggttcaatccctggtcagggcactggatcccacatgccataactaagagaccaggcacagccaaataattaaataatttttttttaaagaaatgtaaaaggttttataattgccccattctggtgttcttgcctggagaatcccagggtcagcagagcctggtgggctgccatctgtggggtcgcagagtcagactcgactgaatcgacttagctgcagcggcagcattctgatgtttgtgtgagaatatatgtggaagtctcttgatgtggtaaatatgccatctataaatgcacttactgctttttgttaataaatgtacttaacaaaattagaattaataattagtgtatccacatgaaatgtggaacttgttctagttttgtgaaaaatggcgttggtgatttgatagggatcacattgaatcggtcgattgcatctgtcagtacagtcaggaggagtgtctgtccatctgtctatgccacctctgacccctttcttcagtgtcttacagttttctccgtgcagctcctttgtccccttaggtaggcctattcctgtttttgttgtaatggttagtggggttgattctttaatttctctttctgggttttcattgttagtgtataggagtgcaagtgatttctgtgtattgattttgtattctgcgactttgttaaattcactgattaggtctgggaattttctgacaatataagtggtgctgggaaaactggacagctacatgtgaaagaatgaaattcgaacactgcctaacactgtacacaaagataaactcaaaacggattaaagacctaaatgtaagaccagaaactatgaaacacttagaggaaaacacaggcagaacccttgatgacgtaaatcaaagcaagatcctctacgacccacctcgtagagtaatagaaataaaaacaaaaataaacagataggacctaattaaactgaaaagattttatacaacagaggaaactataaataaggtgaaaagacaaccctcagcatgggagaaaataatagcaaatgaaacaactgacaggggattaatttccaaaatatacaagcggttcatacaactcaataccagaaaaacaaataacccaatcaaaaagtgggaaaaagacataaacagacatttctccaaagaagacatacagatggctaccaaacacattgaaaatgtgctcaacattgctcattattagggaaatgcaaatcaaaactacagtgagatatcacttcacactggtcagaatggccgtcatcaaaaagtctgcagtaaatgctgggcagggtgtgggggaaaagggaaggaaccctcctccactgttggtgggaatgtaaattgatggagtcaccatggaaggcggtatggagattccttaaaaatctaggaataaaaccaccatatgacccagcaatcccactcctagacgtataccctgaggaaatcagaattgaaaaagacacatgtaccccagtgtccactgcagccctatttacagtagctaggacatggaagcagctggctgtccatcgacagatgaatggataaagaagctgcagtccatgtataaaggaaatattactcaaccatataaaggaacacatgtgagtctgttctaatgagggaggtgaaccgagagcctgttctagagtgacgtaagtcagaaggagaaaagcaaatgtcgtatactaatgcatatatatggagtctagatagagggtactgatggaatcatttgcagagcagcagagagacacagatgatatccagaacagacttaggacacagcaggggaggggaggaaggagagagtgggatgtatgaaggctgtaatgcggagacttacattaccacgtgtaaaatagatagccagtgggaatctactgtacgactcagggagctcaaaccagggctcagtaacaacctagagtgaggggatggggagggaggttcaagagggaggggacacatgagtacacacggcggattcatattgatgtttggtggaaaccaacacaattctgtaaagcagttaccctcaattaaaaaataaatttaaaatttacaaaacagtgtaaaaatgttaattgcaaacattggctaaagtcattccaaattagcttatcttaattttaaataaattgatgaaatttgtcatgaaatacaggaataagatcctaggaaagcttgaatgttatataataacttgcttattaatgctattattttgtatatttaagtgtattatctcctgaataactgtaactggattttctgtcaggaaatgttaaatcaacttactacttaggttaaacagtgttaatttctaattaaatatttaatacatcctaaatggacataagtctgagtgaactccaggagttggtgatagcgaggcctggcgtgctgcagttcatggggtcgcaaagagtcggacatgactgagctactgaactgaactgaactgaagtgatattatagaataatatttcctaaaagtagtttacactatcttccactaattttgtgaaaggttactccttttataccaaaaatgaaatttctctttaaaaattcaggatatttattatcttgacttgtctcgtttgctaattattagactttttaaaattcaagttctaaggggcctatcaatgcatgctgactaatttccaaagtgaaacactgactacatgacttcaaggtgacttctaacagttgctgttcagtgttttcatatgagaataagaatgtcctctgatttcatcacttaggagttatttttgtgaaaaaacctctaaaatattactttcaccatttcatccctgagtatgtgttattttaattccagaagaacctaatcatagcagataaaaatacaagtattcggtgctgttttcttaatactcaatactattttgaaaagagattaaaaactgaagtttaaaaataacagtttttgctaggccagagtacagtttttgctaggccagagtaactgtattttattagcacttttaaatatattgaatctgtatattttcgactacattttattctttgatataaatagaatacataataagcatctgtgggatatgcaattaatgtcacttttgaggaaagatcctcataacacacttgggctttggcattcttaaattatgaggactttacagcactcatgggataaattccatatctcccaaatgtttattatacatctttcatttcccttatttcctattttctggattagcagttgttttgctgtgttgatgtctagtaatttagtagaggaggttcttgattattgataaataatctgctaaatttgggtattgtttccaaatatttatatcacagtatatttgttctaacacatatcaatgtgattgtgtataactaccaagtttttcgagctgatatttgaagtataatcatatggtcaaaaatacaactgtcatcaaagtcagtataattacccaccttaaaaattctctctcaacaggttaagaaatggcttcctgttctaaacacagtcagtgattgaaatgttcttatctttttaatgagctttacattatgtattaaatataaaatatatgtttgataccttgttatgcactgggcaatccccccaagttaatccttctgaaaaagctgggttttcctacttctatatgaagagttataattaagaattattgggaaagataattatttgaaataatgattaataattgttgatattcattgtttcctaaggaccagacattgtccctagtggctgtcatcagctacttattctcacaacacattggtacacgtattgtgaccatctccattttgtagatgaggaacttgaaagtataaaggcttattttgtttagataaactagctaccaaaaagttgagccaggctttgcactcttgagcctgcattcatactcttgtttgactaggactatgaggatgtaggagaatttttaaggtgggtaattatactggagaatcccatggactagaggagcctggtaggctacagtccacggggtcgcaaagagtagtacacgactgagcgactttacttacttacttacttaattatactgacattgatgacagttatatttttgaccatatgattatacttcaaatatcacctcaaaaaacttggtagttatacacaatcacactgatatgtgttagaacaaatatactgtgatataaatatttggaaagaataccaaaatttagcagattatttatcaataatcaagaacctcctctactaaactacgtgtaagacacatagacgtactatgtatcagactagaccatgagtcaaatgcagggcaagcagataagcagcaaagaccagacaaggtcaaggcctagaatcagaggagccttgttactagtgatcagaaaccagcctactccaaaatttcattccactaaaattcagtgcaaaaataaaaaaagttttgcagtgtagttgatgtgtttgagagaggcaagactggaaacatggatactggtaaggatggctttgcccttgtctgggtaagagttgataatagcagtggaggagaggtggtctgaagaaatgtttcactgatagaatctatggtttggtaataacccagactgatagtgcttatttgagaaaacggaggacgctgtggaatggagttactatagttgcgcagcatccagtgcgcctccctgctggatcaccttttcgtttcttctgaagcagtctgcccagtctatgtgttactaaacccgaccgcctcagctgcttgcttcctcgccaccagcctgaagctcaccttgtcttctgccctattatcgatacctctgttcactctctgtataccctggagttaacagtttccctcttctttgtgaccaggagccattaggtattatatcttcaatgtttctaacctagttctctttgctagtttcttaagaaaaaaatgaatcagcaaaacaaaagcctttctttgagccgcctcctccagtaggcctacttaacgcctctttttgttttctaaacctccagaaataaatatttcagtttcaatttgccagtgattcagtgtcactgtggagtaagtgtaaatggttggtctaaatccaccagttataagacagtttggaagattttaaacatgagccaactacattctgtctacaagaagctcacttcggatatggtgtttgtagattagaaggttggaaaaggtaaaacacagaaacattaaaagaaatggggaaagcgataataatgtcaaataaagtacagagaacaaaaaattaccacagacaaaacggatattacataatggtaaaagggtcagtccagcaaatggatttagcagtccttaatgtgtgtgtattgaaacaacagagttgcaaaatacatgaaccaaaagagagctgaaagaagaaagacaaatccatatttatagctggagactattactaactgatagtaaactagacaaaaaaaatatagaactcaacaatggtagtttataccttcagttcagttcagttcagtcgctcagttgtgtccgactctttgcgaccccaagaagactaattcaaagtaagcagaggaaggaataaaggtaaggatggaaaccaatataattaagaacactacaaagataatagaataacaagaaacagaagagtaagaaaaatgaaacaaaaagctatttctttgaaaagattaataaaatcaacaggcttgaacaaaagagaggcaggagagaaggtgggcatgcttacaggagagcacaacaagaccctcgtggtgatggagcgtgtggtgttaggactgtgaactgctgcgtatcctgggggtgatcgggtgccatgtttctgcaggacgccacccttggggaaactgagttcacagactctctatgcggtttcgtccaacttcatgtgaatatacaattatctcagaataagttttgttaaaataatgtcaattcagatagctcacgtctttagcccaaccaaataaattgggtttatttattttcttagtattgagtttaaagctttctatatattccatagagaggtctgttgtcatatttgttattcacaaatagtatcttcctgccagtggatcgtgttttcatttcttacaagcatctttcatagcgcaaacatttttcctttctggtgaaattcaaattatctgttgttcccataccaagtttgttttggttgtcttatctaagaattctgtgtttaacccaaatcataaacatcttattttcttctgattgttttgtgcagtatgtttaggcctgtgatccattttgagtaaatttttgtataaagtgagaggtcgtgattaattaattatttttggcagatagatccaggtcttctagtatcattgtggaaagactatccttttcccattgagctgcctttgcatcttgtcagaaaccatttggtttgatttgtgggtttattgccgatctgagtttttacttctgttgttctgttaattactgaaagaggagtgttggtccggctgtaactgtgaatttctctgtttctgaaaagccgcttcagaatgacagacatctaagattgagaattagccatccagtattcttaggtgcctgctaagttgcttcagttgagtccgactctttgtgaccccatggactatagcttggcaggctcctcagttcatgggattctccaggcaagaatagtgaagtgtaagatactccagccaagaccctcttctgcagtgggtcttcgtgactcagggatcgaacccacgtctcattatgtcacctgcattgcaggcacattctttaccattagcgccacctgggaagccttaaaggttttcgttttgttttgtttggaggcactgtgtagcaggtgggatcttagttccctgaccagggatcgaacctgtggcctctgcagtggaagctcagtattaatcactgggccaccagagaagttcccagtattcttatcccaatacaaatggcacaattttcttttaatttgtggcaggtaactcagtcttgtttctttcctggtactttttgacacacagagaacgtaattccagttatgtatatggtatgtatagacatgttaataaaactgttaaatacagctggcttacgagctttgaggaactagtgaattccaatatgatcttggagtgctgtatctaaaaggactgtttgctatttggaaatacagtgtttaacacagaccaggacttttttttttttttttcctcttttctaaaattcttcccataggttgatttttttccaattaaatgactttttccactagtgttttggaccctaataaatacatgggattagtggaaacaaccaaaaagcaaatgatgtccttttcatttgatgtatttgaatagttttagatgattccaaagtattaagcttctaacaagtatttacaatgaatgttaaaatgctttcaatacatatataagaagtttgtattgtaaactttttatctctgtaattaagaccatcctttaaatttatctgtttgtcagagcaattcatttattaaagaccaatatgtaaatattttctaaagtatatgattaaattcacagtgttgaaatatatgtttctgattaagaattgaggtgattgagacacaagacatgttgtgcacctgagaaatactgatgtgccagaggctgcaggccaagatggttcataacagaacatcacccccaccaacacccttctggttgttagggatgagagtcatccttgtttcttgagttcttcctcttaaacggtataacactttgtcatccccagtgttaaccttacccagcagacctggtcaacctcagtttacatcaacgttctctggaggagcttgatagaacagttgactacacagttgctgtgatgtctttacctggacataagtgtgtgggaaaacaaatatcaccccacacctcagcatgcataaaatgccatctaatattctccaggaagacagggtcagcgtcagtttcagtcttaatggaacactgggatgtctttttaagccgtctggtttaacagcacagtgacacgactgtaagtccagtatcacctttgagtcagtgagccagtagaagacgtttaggttggaagggacataactttggtcctcaaattggaactgttatcttctaaggcatgaaggcgaaattttcaggacttcctgggaagtaacagttaagtggaggtgaagtacttgccatattaattagcctctcatgttccgtctgtcccatctctcatccttggcgcctttatttcatgggtctctgattgttttcctcttctctaactccttccataaccaagtaagccagaggcaaattgaatatctgcagctaattgccctaataagctctttcctagtgctgtatggtaattcatgtatgacatcatactccattattaagtatagcctgtaattaacctaatttgtatcacttacatcagtgattacagtgtgtgcctttaataggtgtctgaccagccttaagcttctaccttatttttcggcctttagggtcttggcctaagatacgtaaaatcttttatgggaactactagtacttggaacagacgcctgtaaatgtcagcttttccagagaagtgtctcttgaccagcttttaagacatcttagatcatccaatacacatattgtgtggatattctattatctttccaacttctataaaattgttttaaggatagcattgtaccattaaataaactttctctgacccacaatgtcaaggtagaatcccgccttcctacctttagttcttccctgacctaagtattaggaaaatgatgagcttgctttaatgatgacaacctcttccaggctcataatttcataagatgctgtttgacaaacactggtgattcaaccaggaaaactcatcattttttacattcagtttaaaagggtggaaagtaagaactcttctaccacaaactctatgaaacacttttttttcactcatagggtggcactaacggtaaagacggagaaggcaatggcaccccactccagtcctcttgcctggaaaatcccatggacagaggagcctggaaggctgccgtccatggggtcgctgagggttggaaacgactgagtgacttcacttccacttttcactttcatgcattggagaaggaaatggcaacccactccagtgttcttgcctggagaatcccagggacgggggagcctggtaggctgccgtctgtggggtcgcacagagtcggacacgactggagcgactcagcagcagcagcagcagcagtgaagaaccctcctgccagtgcaggaagcgtgagagctccaagctcagtccctgcgtcaagacgacccccgaggagggcacagcagcccgctccagtgctcttgcctggagaaccccatggacagaggagcctggcgggccacagtccacggggtcgcccagaggcggacacgcctgagcgactgggcacagcacgacagagatacatgggttaagcgtgcgtggggcatattgctttttacttatttttgcttttggctacttttaattcttcatcatagctttctttacccctcaattttcttagtcttaattttggagttttaaatactggatttgtatcagaatttaagtacaggaaaagaaatactgtttacaattcagtttagcttctatatatacattttgtttctggaatctcctttcactaaaatttgcttccctaatgaaaataatgttcttgtttccattttacttcagtcgttagtagtttgatatttctgtataatttcatgtaatgattttagcaaacctgccacctccaaaaggtccttattatggcttgaactataaattgtatgtagagttaaaaaaaaaaagtccagactttgaaaaaaaatttaaatagtcttattaagattaaatgttatgctgcatggagtttgtgggggaaaatatggtataatttttaaaggatttttattttgaatcagtaatcattaaatcgacataaaccctgattaaaaggcaacagagacaatgtcaagatgaagagaactggggaggaaaagctgagtcatggtctgaggaagcccacctgtgccgagcaggttcagcttctactaaagaaagggtctgccttaattaagtcagtgggatttaaacagtggtgtacgttacgttcagtcatgtctgactctttgtgaccccatggactgtagcccgccaggctcctctgtccatggggttctccaggcaagaatactggagtgggttgccatttcctccagcggaatctttctgacccagggatttttctggcgttatcttgtgtctcctgcgttggcaagcagatcctgtcctgctgatgccccctggggagctgaagtgtgagcagtggccactgtggatgctctccaaaggagctagtgttcccaggtgtgacggtgcgcctctccagcctagggcgggaggggtcagcgctgcacgtgtgtcttagtgggaggcgtcttaccatgtcgatggctgctgtgaactgtacactcagttcatttgtatcaccaacttataattacaagggttttgttttatttgaagtaaatattgagagaaaaattacatttatcttttgtttatatcctcttacagttgccaaacccaataacaggttctgggttgcactaaatgtttgcgaaagttgagttaaagtcacattaaaagtacttccttttataaggttgtcatgtggcattgctgtttgcagagcacttaaaacagtgtctggcacatggaaaacacttcctaagtgtcattaaatttaaaaataatgataaatcctagcaaggatcataaaattctagttaagactgcatacctctaataataaaaatgatgaataatattactccttcaaattgaaaattaatgggaaatggttctttccagagtcatgagccccccaccccagatgcctttgctctggtccagcctgtcgggggggctgtcttttctgcagcctgatggcctcccgacagggggagggcccgcctcttgctgtttgtgatgaaagtgcagatcagggcagactggttcccaaggtgactttcttcttatctttgagtattcactcccactcttcttcctgggaaaatgcgatttcaagacagtagtcagtgtgaggtgagagggattggttttctaatcatcctcttccacagattgtgttgctggcgtggggggtgggcagctcctttctgcctgcccagggtccatctggaggcttgctcctggccgcccacccatgcttcctgctccgcggcctcttgctcttcgcctcccctccctgtacccgcttcctgcctgcccctcatggcacccccacctctgagccgtgccttctgctggtgttaggacataaaggccaaggagaagggggaaaggagacaaattaaacaaaagaggaagctttttaatgtttggcagccatgccttcagcccctttctagatcttgcgcagcctcactgtttctttttgaccagggacactgagacattgccgccccccaccccaccccccttttaaaccattaaggatctcttgagaaacaaggtttgactgatttcctggtactgtgtctgcagccacgggtttaacgtttgcctcccaagccctgcgttctttattaagcatctactgatacccaatattgtgctttattttgggtatttggaggattactaattagaacagggatcaacttctctagaaggctagatgaaaaccagtagaaaaaatttgtaggcgtgggcttatttttaatcagcagtgggaaaatcttatatcaagaattatttgcaaaatagctggtttaggatcagtgagtgccttcatcctgacgtctcagcagaggctcagcagtcctcagccaatggctgatggatggggtgccttctgagtgagagagtgggcaaaagggaggataaggtccaacactaaggttgcacgtctttgaagcaacacagatgactgggttcactcccatgaaaaacaaccacatcaattgttttagccagtaattatcagtttttttaaaatcagcatacctgttttttatattgaaatgaccatggcccttctgaagcatggtttctttaacaagttgacacttactttaataaaacattatcactcaaaatatttctagaagcccgtttgtaattgctgttattaccagtgtaggagcgatgttggagacgctgttcatggccgtgtaaccaagtcttcagaaaaaggttttgcctactgttgcttctcaggttgtagataaaccgcatttggctctaattagaagtgttagttactttcatgaattcagcccgtccttaaaacatgctccttggtttctctgggaggcattcaaacaatctgccttggctctgactgaatcttttatatatgtaaatttcggtgtgtttgttttaaaaagaatccgtttcctctctttctagtgacgcagactatgtattttattatgaatgtgtggaaaagtgatgttcagtacctacagcaaagccaagaccacacactgtactagttgacgatggcgccttcttctgaagtattactttgacgtaaaaccggattgcctgaaagagaacccagtctgatggctggcctttcctgtgtgagtgagtgtgtcagtcgctcagtcgtgtctgactagcccccaggctcctctgtccatgggatttcccaggaggggattgccatgctctcctccagggggatctcctcaacccaggggtcaaacccaaatctcccacattgcagccggattcttcaccatctgagccaccagggaaccccgagaatgggtagcctatcccttctccagaatgggtagcctatcccttcccaactcaggcatcgaaccaggctctcctgcattacagcggactctaccagctgagataccagggaagcccacgactcacttgagttttctgagttttgttttctacttgagccattttaattgaccacagccacctgagggacgtgcccctcttactgccaactaggaatgtatgggagccttgagggtgccgggaatagaacagtgcgtttgaaggcttgtggcagcagagagcatcggggcctggctcccggagcctccatgcaaacagcggagcctataaactgccggccttctgctgaacgtaagctggaagttagagggtctgggagacagtttggtggagttctataaaaaccttggcttctacgacagcaactaaagggaaatggtgaaccgagtgaaatgatcctgtcccttggattgtgaaccacagtccagttggccagatttggattttcagctatagcccagctggtgaacagttcaaaactatttttgatcatgtgatcccattgtggccaattgggtggtttggcagacagcggcatagtaaatatctattcacacaaattgtacgcatactgcatttgtccatgtgcagcctctgcttgtctgtattgctgataacatctccacatagatgggtgggtaaattgtgtgtgtgggtccatacctggaaatttatgcacagtaattatgcactttgattccttctaggaaacagaatggtaggaataatctagttaaatcagtttctatggggatttttttttactcctttttttcatgtttcctccagttgtaaaaattacagtgattacacatcataaagcctatctgtaataaaacgcatcagctggccaaggttttcatcgctcactcaataatccattaatacagcaacgctgcccaggcatctttataataccaactcggaggtaattttaatcagctagaccagctggtatttaacagcagctgctggagatgccacaaatatactcaatagctgacatctttatttgcagtttttcaaggggagaagagattctcctgtggttacttgtattaagcatttaaaagaaggtgtaaagtatacaggggtttatgcctaaatgagaaggggaagggattaacaatgaaacaaaggcgataaattctatcaggagcaaaggtttgtgaatgaagagactgctcaaataaataagtatacgttgctttgggcttcggatatttttctgagttgcatttccaaccgtgggtatcactaggagtcaagtgcagtctgcacgcagcatcctgaccctctttgcactagagctgcagtgtcttcctaggaaaagctgtgaaaaggatccgagtgtatgagagagagcgctgctcgtgtgcgtgggttctgtctcagcccctgcttgctgagtcctttgttgttgttttatggagatgttttattaatgttcagttttgatactttaaatgaaaaggatcatcaccagtatgtcccgtctagcagtaaacgtgaaatgccgtttcacatggtggtatgtgagtgtggttgggggaacaggcttcagctccatgaagtcaacagtcgcaaacccattataaataaaaatttaattacacttgtgggagcttggcttacagagctcagaaatccataatggagcttgctggtaataaaggcctgatctgtttgttaaactccactgttccatccctttctttgccttcttttgtaaagtgcttggacatctccgtggagtaagacctggtaaatggagctgactctcttgagttacaaaatgtatatcctttacttctttggctgtgtatctcccttttagtttaataaccaaaagaaaataattaggaaaataggaaaaggcaaaggtattgttagaaagataaaagtctttcaaaatagttacttttaatccacatttataaatgagggttttacatacagataactttgtattcagatgtgttggtgatacaaatgtctgatacgtatgtggacagaagctaagtggattccattttcatggagaatttcatgtatcattttttctaagactgatttcaaaatgcaatataaaagaagtggatggagttgtggtccttgtacatttggcatagaaatagttttatcatttctgactcttatagagcagtcagaccttttttatggtaatagttcttgctgggaaaggatgcattacaaactcctaaaaaagtaaaatgtattaaatgtttaatgtacttctatactgaattatcagaggttaacaaaatttgtcgtaatacggagtcttttacagttaacttcatttatgtgccactaaattgtctttttccaaagccaaatagtgatgtgtctgtgttggactatgattgaatactgaaaattaaaatcgagtgacagaatggattactgagatagcaatttgagttttaaaattacttagcaagcgttttttcctgttatttgtagtgaaaacagtctgtttaagtttgcttagtgtgtttgacaacagacagtttgatatattgctgggcacagcggtaggttggacttgagtggtattagctctccgtgttttgattaatggtaattgtttcgatgaaaaggcatgttttacgtacaactcatagttctggaaagcagaagtcaacttgcaagatccgtaattactgttccgagttagcagataaagagggcaaggagaacctgccagaggagcacagtaggatttttttttgctttttgctttgtattgtagttagagactgttccttatgtcagaatataaatcttcggttatttatcttttgttcagtatttgaagttgatttatgacacatttctgtatcccataatttagtttgaatcccatactgaggtgaaatttcacctgtctctagagtcgactataaaaggaactcaaagccagctacctagtgtagtgtagattacagttttttcctgatttttctctagtcttgtcctcttgttttaaaagaacgcaatttagaaaacaataaaaaggtttattttaacacctcagagatttctgttgctgtgtaaaacattttacatttcattaatgtacacaaacacaagggaaaatgatcatttttacttggggaaaataaagcatgctttgaaggaccaattgtcgtcagcctgaaagctgtcagaataccgccctcgtaatgtctttctttctcacactgggtctgtacacgtacgtgaagtagacgtgagtatacaaggttattgatagatagaaattaactttaaatgagtgaccttcccttttgcaagagcaaaggaaaacgacttttctgtaaagattcgagaagggtctgggagaaaatgccctcacatgcttcacggtccgtgttttaagagggtgagaaatggaagttctgcaggtggaggaggcactaggggagacctcctgcatcacttctctctcttgcttctgctagaagagaactgggcggtagagtaagtgtgaggaggatgatctgaaagtggcaggaagggcagccgtgtttgtgaagctgatgttgaggaccagcatttgcacagcctgcccctgcttgctactgaagcatagaaatgttgagtctgttggataatttcctaaatgtttatccaagaagcttagtgtgatattttaaaaatattagtcctccctgagagtagcagatgccctcctgtgcgtcttctgtataatccatgttctttagtatgtttgagggaaagcggggtgggaggtggaatatgcagtgcagaaacttgtgctgctatttctgtctaaaacggaatcaccgatcctgctctatagtttcctgaactgaaatggattgaaatgctatttgtcaggttgggtattccaaccagaattaaaattaataagtggttgtctcatgcacacctaagcctttgacataaaaagggaatataatttttaaaaaaattccctcatagtgaatagccatgtgtcattgtggcatcttttattgaaaggaactttatttaagtagcataaacttgttggatgggcttcaattaaatgatgatttgttaatgcaaatgcgtggtgaatgactggtggtacatctgtctcttcatccacaggccattactgtgcagcattagcacatgattgtaaaaaacgagaaatcattatacgcaggtagtacatattcagtcagttctgaccttatgtctctggcgaaataaaaaaggtatataatgtaaatgatacttaatctgaataacaaaaacacagcactttgaatctctctgactcaatctgttaggtgatgtgaggtgactgatgtttccatattgatggttattggtgccccagtgggaaaaggctatcacttgaatgctttgtcattttattccccatgcattcctccaaccaaattgtatttcaagttctattttcgttttgtttttcttcttgaaagtggtttgtggagttgcggtgatgaccacccgtgtgagcatggtaagcagtgacaattaatatagcaacaaaaaattggacaattagcttcagctccataagcgtctgatgagccatttgtcagtcttttggtgaaataaactactctatcttaattctctgctcttgcagcaaataaataaaagttacgaaacacccgggcaccaataaaatataatttatttcatagggcatgacagaactctttacatatctaaaatgaacatgttatttacaaatgacttgtgatactcatataaaccatggatctgtgtgctaactgctttcattatagagatagacattttttttctgattgtttaatcatttaaatgtatcattactcctaaaggcatgtgagttaaagtgactcctcctggtgtgcttaactcatgaggccaaaaagaacttcagaaatgagctattctgcagctgagatattaagaatttactggaaaggacaaaacaataattttcatttgggaatctctcagctctttactgattatcttcctgccctcatttatttttaggaaccctggtttctcaaaagtttttcatcatcactagatatcaatcagacaaaacaacattgtaagcatctttcaaattgtattttatactaggttaaaagttgtagtaatcaccgtatgatgaaaatgtgacgtgaaaattcacattgaaaatgtgaagggtcattcaaataaaagcctagatatttgaaaaacagtaattagttattttaaacggaacaagaatacacaaaatgctggtcagagtagtatataccgttattctaaagtgtaatccttgaggggattcccaggtggccctagtggtaaagaacctgcctgccagtgcaggagacacaagagatgtgggttcagcccctgggttgggaatatcccctggagaaggaaaggtcaacccactccagtattcttgcctggaggatcccatggacagaggaacctgactggctagagtccatgaggttgcaaggggtcaggcatgacttaccaactaaataacaacataatccctgaaacagtagtatcagcatcatcattggagattattagaaatgcaggttcttcagtccctgctaggtcagaaactgtgaaaagggcccaggaatctgtttcaatactccctgtgagtatttctgatagactctagagtctgtgaatactgtaaagtaacgacatagcacggccccatgcaccgcagcacgccaggcctccctgtccatcaccaactcccggagttcactcaagctcacgtccgttgagtcaatgatgccatccaaccatctcatcctctgtcgtccccttctcctcctgccttcaatttcccagcatcagggtcttttccaatgagtcaacccttcgcatgaggtggccaaagtattggagtttcagcttcagcatcagtccttcgaatgaacacccaggactgatctccttcagaatggactggttggatctccttgcagtccaagggactctcaagagtcttctctaacaccacaggtcaaaagcatcaattcttcagtgctcagctttctttatagtccaactctcacatccatacatgaccacaggaaaaaccatagccttgactagacggaccttagtcagcaaagtaatgtctctgcttttgaatatgctatctaggttggccataacttttcttccaaggagtcagcatcttttaatttcatggctgcagtcaccatctgcagtgattttggaacccccaaaataaagtctgacactgtttccactgtttccccatctatttgccatgaagtgatgggaccggatgccatgatcttcgttttctgaatgttgagctttaagccaactttttcactctcctctttcactttcatcaagaggctttttagttcctcttcactttctgccccatccaactctttgatatcctgtagactgtagcccgccaggctcctctgtccattggattctccaggccagactactggagtgggctgccatgccctcctcggggggatctccccaacccaggggtggaaccggtgtctctttcgtctcctgcattggcaggcaggttcttcacgactcgtgccacctgggaagcccgtccatatgctgaagttaattccataaaggtttaaaaatgaaaagcgaaagtgaaaataaatagaaaaaatagttgaatatgttaagtattcttggatatgggaagacctttctaggtatgatttcaaagcaagaaaaccatagagaagattgagtggttttggaaaataaaatgttaaatgtatgggagaaaaaccatcaactgaaggacatataaactacgaaaaggatttatattatagaggattcatgacattaatatattaaaatttcttacaaatagttagagggtaacaactgaacagagaagtgagcaaatgatacatttagatatgtgtatgtgtgtgaatatgcatgtatttactaataaatatactaaaaaatttaactcagtaatcaaggccatgctaattaaagcaacagggatgtgtcatttttgcctactgttttagcaaaggtaaaaccaaaataatgtaccctgtgttggggaagtttcatggaatgcattaatttgatagcttgtttcaaaatgcattaaattgtacataaactttacgctctagttccattactgggcatttattcaaaagcaataattaataatacacagagattttgctttaaagattttttggcaataattatttatgatactaaaaatttctataagtataaatgcctaaatatagagcatgggttcagtaggtaagagtgcactgtggaagacgtaagccacttcattttttaaaatgcgtacttaaatcttttaatttcatttttcatgctgaagtgtggttgacttacaatgttgtgttagtttcaggtatacagaaatattggtttgattataaatatattctttttcagattccgttccctacagtttattacaaaatactgactatagttcccttatgcagtcactttaaatcacccttagggacacctatctgttgatcttaaaaaaaagattataatatacctattatgagcatatttttatcatggaataaatgtgtttgtatcttaatgtgcatagattaagtttggaaagccataatccacagttatttctgggctatgagattatggttagccttttgtttcctttttttcctaatgcttttttaggttttctgacacaaatacattttatttttgtaataagggaagatagtttaatacatccttgacattagttgatacatacaaagttatataaaaccgattgttttaaatgcaggtcaagcatttacttttaatgcattagtggcccagccctgtctgaccctttgtgaccccatggactgcagccctccaggctcctctgtccatggcattctccaggcaggaatcctggagcgggtggccatgccctcctccaggggtcttcccaacccagggatcgaacccaggtctcctgcattgcaggcagattctccaccatctaagccccagggaagcccatttacctttaactgagcacttgttaggtgttggtgctatctctagaaatacagttcaaggcatgtgtcgtaaaaaaagaagatgcataagtaaacggcacgtgaatctgaaagactggtgtagtcaggaaggcagatgtgccggttcctcggaagaattgtcgtctgggcttcatgccgccaggaggcagactgagcgagaagagatggtagagccaggttttgaagaagttcctcggaaatctgggagaggcggagcatttctgtcgtgtgtagagctggtgaagacagcgtggcctttagcctgcagttaggaaagactaacgtgcagtcagagctgagtctcagcaggaacctcagcaggaatctgcaggaaggtgctcatcaggccagagctgaccaggtttgcttactagaaagatccctctggagcagaatgcacctaaatagggtggcagcaaggagacagattggaaaatggatggcgcgtcaggcaaggcagagaaggcgtctggcagtggcgttgcagagtgaaggctgtctacgagtcagagaaggataaacctcagtcctctggcattggaggctgggagaaggaagctttaagggcgaggtgctgttactcccccagttacaggaagagagaggagtggcagggagaagggggcgccatgatgaggtctgagacaggagcaagttgaggtgcctgttgtaatctcttacagtaatgtattatgatttcgttttgatttcctactgcagtttttggcctttcccggtgcctcagtggtattgaacccacctgcagtgcaggaggcacgggttcgatccctggctcaagaagatgccctggaggaaggcatggccaccgactccagtgttcttacggggaaaatccgaaggacagagaggaacccagcacgctgtggtccatggggtcacaaagagtcggacacgactgaagtgactgagcgtgcacgcactgcagttttcagcttgaatgttccttttacaattatctgtaacattctcttaatctcttcccagacactttgcttcatgtaaatgtggtggtttaaaggtcttcatttatataccatttattggaaggcactgtgagaccgtggtttagaatatgaactcaactccaccacttgctctgtgtgaccttaggaaagcagcctgcacctctaagctgtagtttctcatctgcagaatgggcctaattcctttaaacattcagggttgaatgaagggttccataagggcttcccctggtggttcagacggtaatgaatccgcctgcaattcaggagacctgggtttgatccctgggtcggagagatcccctggagaaggaaatggcaacccactccagtatccttgcctggaacattgcatggacagagaagcctggtgggctgcagtccacggggtcacagagtcagacgcgactgagcgcgccagcacacatgtagagctctcaccacaataatcacccaaatgtgaaccaaggttattttatttttacttaagaaagtttatgggaatatacagttttatactggataaaatatagaacatctttacacatttatctaaaactaaaatgataatatatattcactgtgcaaaaccaagggaattctgtacacattaatgtgacattttcagagacttgtaagttgaagagtcatgtgctgtagcccaggactcgatctgtaagaaggtgatccgtggtgactgattaaactagcatggaagcagcaggggacaggtcgtggcactctggatgactgcaaggagaaacactgttagacacacacctgcatttcatgagtatttttgttgtatgaaattgcttagatccctggcagagaaacgcgttctgtctgtcgctgactccgcctccactggagtggcatgttcccgttgccctttcagctcttcggggtgagtgtggagcttccaaaggagaactcccccgagttctgagcagatggatgcctcatcctcggctttctgacctgaaacaggagctgcttgtgctcccgtcacggtgacagcgcggcctgtactcttcctctgcgggacgttcgctgtccccatctgcttgcgtccgtcgggtggtagcaccgtagccagggagcttggacttgcgtgtctggaggcccagcgctgcggctccctgctgtgctgaccgcctccgttaaacacaggtttgctgtttgggggtctcagaccctctgctgcctgaaaggcccgtttgccctggtgtggttttcctgtccaggagtgtagactttctgttcttgctcatcgtgaatttctcaaactgcaggtttgcaggcaagagctgggtcgcggcccgggcccctctggtcgtgatccagcccctgggtggaaggacacacacgtgctgggaagtagaaggttcttccccccctggagtcctgggctgccctcagggcctgtcaggaagtgcacggtgggagctgtctaccatcccgctagtttctggaacaaccagcacatttgctgttgctagcagctgccgtctatggggtcgcacagagtcggacacgactgaagcgacttagcagcagcagcagcagcaactatttcagaacttgatttttttaatagtaagtaaacagataatgttcttctcacattaacattcattccattttaaatttatgaagtttcttttctttaaaattgattcttttagcctctactgcaaggccctcacccatttcctctctgccattaagcagtgaccaacatctttgctctttttcccttaaggtgatcgcctcatccatgattaaaaggattgtctcctcaattctcttaggtaaattcactgcagatgtcatgcaggatattataggtagtcagttttctgcgatatggcatgtgtgtgagcacacatagcccctttttgctgtcctagttacacaggacatcggaagggacctgatgccaatgtgtgataaccagtgtctactaaccatggaaacgcgaagggcagcatagatgaccacttactaatggccagactcttctcttcaagtggtttgttttgacacccagtcactaagtggcttttcagagaaagcttagcttgatgggtcgtcacataagctatttgacatttgtccccagtcagaccggatgccacatgaaaaatttactcaggcaagaggctcctaggaataaacagttctccagtgttgctcacaggggacttggcaaggtgagcggaacttcagcttgtcacggatgcactgttctgacaaacataagtagatgctaatggctaaatcgtgacagaataaagtcccacaaccatatggctaattgccacaacaatatcttcagtgttattaatcaagttttcatagtgtgccatgataattggaataattaggaacagcataggccttgcttgtctgcgccgcacactctgcagagacacctcacacaggcactgccgcacaggcagcactgtctcattcagtgccgtcttttcctcagaagtgccccggttagctagtgagttaactgctcgccgtcagtgcattttgtgtgagcgtctgtagaagcacatgtatctaagcaagacccccagccccccgtgcgtccatttaaataggcagtgctcctttaaggcaggaacaggggtctgcccggtttggatcttacagtctgaaagatgaatgcattgtacactaatctggatgatggacattcattttttggccatatatttcccgtttcagctaatttagttaagaaaatgaggaattagaaagcaattgaataaattacaagatgtaagtatttgcataatttgtttcaggcaaatagtatgtaatggtgctcccaaaatgaattattttgagtgtgtctttcaattacggatgaagtaaatattaccatctttaatatcacaattgaaacctgtattttcatgttgctgatattgaaatatactgacttcagtcatttataagctaattccattccttcgtcttaatagtggagcaagaattcatttgtccggggcacagccctcattacgagagcttctcgggctgctttgctttgtggggaggtgactggacagcagaggcatgagactgatggtaaccagctccttggtggtgaagcgtctagacagccgatgaagggagacggctgttgcggctgtctgttgttatggggcttctcgtacctttgaatcctgtgccatctcagtttttctcttccttgcccttttctgtcctgttgcattccttaactagaaacaagtcttactacattttttttttttaagtttgagatattctttggatatttctttgattaaaaagtacttccccaaatctcaaaatgaaagtaactaattagaaacactgtttctaaccggggccaaaaatctttgcatcagtgatctccgaactccacaaagtttaaaatcaatgtgttacccagtttcttttatttaaatgactcttctctgtcttttttcttcctttccctctctctgggtggcatgagaggcacagagtagagactgcattaagataacagcaaaaaaatctgcgttttttttctttcagtcaattcagttaatgattatatactcattttgtgtataaaatgatttagacctttcacttctttctcctcctttgtttttcctagttggttgacaaggaaaaatgaaactgttcatgttgatactaacatttatcataaaaattttggtatagattaaaatattaaaggcagaaggcagaggaaccagagatccaatcgccaatcattagttggatcatagaggaaagcaaaggaatttcagaaaaccatctacttttgcttcattgactatactaaagcctttgtgtggatcacaacaaactctggaaaattctttaagagatgagaataccaaatcaccttacctgtctcttgagaaacctatgtgtctgttaagaagcaacagttagaaccttacacggaacaactgacgggttaaaaattgggaaaagagtgtgacaatacttaacttctatgcagagtacatcatgagaaatgctgggctggatgaatcacaaggtagaaatgctgaaaacctcagatgtgcagatgatactgctgtaatggcagaaagtgaaggggaacttaaagagcctcttgatgaggatgaatgaggagactggaaaagctggcttaaaactcaacattcaaaagactaagatcatggcatccagttccatcactttgtgacaaatagaaggggatagattttattttcttgggctccaaaatcactgtgaacagtgactgcagccatgaaattaaaagactcttgctccttagaaggaaagctatgacaaacctagacagcacattaaaaagcagagacatcactttgctgacaatggtcaaagctgtggtttttccagtggtcatgtacagatgtgagaactggaccataaagaaggctgagtgctgaagaattgatgcttttgaactgtggtgttggagaagactcttgagagtcccttgggcttcagggagatcaaaccagtccatcctaaaggaaatcaactgtgaatattcataggaaggacttagtactttggtcacttgatgtgaagagctgactctgtaaagccctgatgctaggaaagattgaaggcaaaagaagggggcagcaaaggattagatggttagatagcaacactaattcagtggacgtgaatttgagcaaactctgggagatagtgaaggacagaggagcctggtgtgctgcagtccatggggttgcaaagagttggacacactgagtgactgagcaacaaccggccacaagaacactaagccagtgtctaatggtttagttgctaatgtcctaaagtgaagcttgagctacatgtagatgttatttgttcatgtctcgctttaaataaggtgtcattgtgttcttcgtttaagcttcaggtttatcctttgtttcgatcaggatgcacatggcagcaagctaacagtaaaccttctacctcagactggctctgacattgaggaatttaattatttcatacagctgaggtcgagaggtactgcaactctaggggctcagttgagaacgcaagtattttctctatttaacctcattgtcagttttttaatgtccattctcttgtaatcacaaatgagctacagccttccttgttctaacctagtgggaaagacagaatgaatcttcaatcaaatacaaaacaataattcttttcagtccaaatgttccagattatatctgtgcctgccccaagctgagaacagtgtccaaggagaatatcatatattgtttgaaaagtagtgaaagtattagtcactcagttgtgtccaacgcgttgtgacctcatggactgtgccccgtcaggctcctctgtccgtggatttctccaggcagaaatactggtgtgggtaaccatttcttctccaagggatcttcccatcccagggattgaacccaggtcttttgcattgcaggcagattcttcaccatatatggtttcccttagactgattggagtctgccttcagagcagttgttcgtaaactgtggcctctggaccaccattgtcaacattgcctgggaacttgttagaaaggaagatgctcaggctccaccttggacccactggatcagaaactctaggggtgcagtgcggccatctgtttttttttttttttttaaactttctatctaattttggtgcattctgtgtttgaggaccactctccaccagagcaagggatgctgccagctttattctgaataaagttgggaagaaatgcacagctgaactaaattaagttcctttaggaaggaatgaagccagaatagattcttggtggccagtcaccttctctgtgctttaaaataagtatattttctctcttgcaaaattaagtgagaagtacttcatttattgtgaaactcaactatcgactgttgcagacagtgctttttatccatctgatatccatttgcttttccttccttattaaagtgaatcttagagtttgttggatatttttgctttagggatgatactgcacctgccctcgggtgtacagtgtgacacggttctgaccaattatagctaacctccagttgatagggattaatttcaaagatttgctttcctgacataggccccaccctttttgtcactttctctttctttcctatgtgatggctgtacatacagcagccattttgcatccatgagtgaccgccaaagagaatttcagagctcttggcactgacagcttgaagctgtagtagacccaaagccagcaaacacacacttcagccttctctctccagagactaaaataaaccttgtattgaagacactgtttagcttttttcttacttgcaaccaatgcagttctcatgggttgagtaacatagtgtagcttccgtaacagtggaaacatgtggctgtcctgtttctacactctctcctctgttttcttgacttgacttactgcccatattacaaagctaaacccacatgcctgaggcttgaatctcccctctccatgtcttaagtaactctggcaagttatttaaattcattaagccatagtttttgaaatgtaaaatgaggataataataaatcatttggctgttaaagggactaaacatgttaatgggtgtatgccattagccccatgcctgacacattgtgagcttttaaaaattgtggctctatgctgttgacgttcttttaagttggaaactgacctatatctgtaaatattatactgttcattagcataggagtaagggcatagactataagaaaagaagttagcatgggccttactttgttgcagcacttatttggaccttttactagcagcttgtaaaactcttctgagagggctattgtgccaaagatttccagtaagtatgaataggcatttgctttcttctgtctagataacacctcaactctttttgtctttggggaatattatcacttaaattttccaacataatagctaaaattcatcctgcataatttgatattctttaaaattcaaactggcttttgtagacctctgaaagatcattgcttagattctctagtgtaccaggcattacccacgcctattcattttttgtctacagcatttaaaatagttaaatgttcaagtgggcattaatactttttgctgataaaaaaaagtagagcagtgattatcagggagtggtcttctgttttcctcagtccaggaatcatggccctcccaggtagagtcctagacggggccttctcaccatagtgtacagccgctcactgcagggctcccctggcccccagagagaggcggagaatgggtcagggcagaaggttttggcgttatggaagcatcagctcaaggatgctacctatgaaatacacatacccttccaccctcatataccctgttgatagttatttgtgtctcaaatagcagccatatttgattcttacctttcattttttgatagaaaaaaacttaagagcctcgtgttagataaggccataagttgtcaatgtatgtttagtaatacaacccattgcaattgactaatttaccattttcaaaatgatcttttaagaaataattacttctcttatcttttgggtatatatactcagatttcaaggcttaggccaaattcaaatcttattttgattaaaagagtacatggataattgattttataaaggtttttgtattattcctaagctgactggcttatctgtgctttattttatctgaagacttttcctctaagattgaatgaaacatttgctttaaatacacaaagtcagatcactttggaaggaataaaaaaaattatcagctctaattatccatttcaatatcaagctcagaagagctcaaagtgttcaaaggaaaaaccctttggtacaaaggaaaaacccttgtcctgaacgcttttcgtacagtactgtataaaaaacgaaaacctttatgtagagatttatatcaaaagctgacttaccaaggtctcagtgtttggctttagtagatctttaaatcaaaggccagatccccttatccttagaacaagaaaggtgtatttactgttgtaaatgaaattatatttaagagttaggcttttcttaaaggtacgaattaagaaatagagtcttcagttttatgtaggcagttctagagtttactcctgatcccaccatttttcatagctctgtagtgcttcatttgttaaatgaaggcataatgattacccccctcaaggatggatgtaggtttaaaagaaaatgagttccatgaggtatccagaacaaatgtcttcaataaatggtagtttgtattaatcaccgaagtctatacagatgccaggaattagcgtcgattggaatttctaaagctgctttggatgatgagtagaaaatagccccactaccttcccagtggctcagaaagtccatatttatggggcaggtcttacccgtttctgttcagttcttcggcctcctcacccgcagctgcctactcacggtcctgtccagtaactgcaccgttgaagagcctgcacttcagacatgggttctgcgccttgtctccgctcctccactctcccatctcccatccagcctggttccccgttcattcacccctctgctttcccattgtctcggattccacccgtgtcgccagttcctctgctcatttcagttactcccatgcgtctgcctgcagcacccttgtcccttcctgcctctgtgtcactgacataacccagaccccactggggcatgtaagggagcaactgaaaggtgctgcacagaagcagccatcctcactcaccttctcacttcgggtgagcccacagccctgtggagcagccctcctgccgttcctgttgccttgaacatctacccctgcctccccatgtccccaccctttggcatttatctcactgggaacccagaagggagcttgccggctcaagttcccacattctcccagccgaatcggtctctcatccctccctgctgctctccgagcctgccctgctccctgcactcaggcgctaggtcccctacccgaggagttcgttcctcacgtctgtccgctcattcctgctgcagtaagtccccctctgctgtctgttgtcattagcatttgagtatgctgtcataacctcagatatgcagatgacaccacccttatggcagaaagtgaagaagaaccaaagagcctctcgatgaaagtgaaagaggagagtgaaaaagttggcttaaagctcaacattcagaaaactaagatcatggcatctggtcccatcacttcatggcaaatagatggggaaacagtggctgactttatttttctgggctccaaaatcacctcagatggtgattgcagccatgaaattaaaagatacttactccttggaaggaaagttatgaccaatctagtcagcatattaaaaagcagacacattacttgggcaacaaaggtccgtctagtcaaggtcatggtttttccagtggtcatgtatggatttgagagttggactataaagaaagctgagcaccgaagaattgatgcttttgaactgtggtgttggagaacactcttgagagtcctttggactgcaaggagatccaaccagtccatcctaaaggaaatcagtcctgggtgttcattggaaggactgaggttgaagctgaaactccaatactttggccacctgatgtgaagagctgattcattggaaaagaccctgatgctgggaaagattgagggtaggaggagaaggggatgacagaggatgagatggttggatggcatcaccaactcaatggacatgggtttgggtggactctgggagttggtccgagatttggacagggaggcctggtgtgctgcagttcatggggtcgcaaagagtcagacatgactgagcgactgaactgaactgatgctgtcatctctttcatctgaagggataagaaagaaacatagaacacccaagcttgagcataaatccctctccagctctttcctgtttgttacccccaggtaggtcagctcctcatacagagggcagaggagctacaccatgtgcttcttcagctttgtactcttaaacctgccactcattccttgaaccacacctttccctgtgttgctgagtacagtggtcagttttcatccttttcctattcagcttctcatctttaaaaccactggtttctacctcctccttgagatactctctttactggatttccaaaatacctcattctggcttttctcctttactggctgtttcttcttgctctcctttattagctcattgtcctcttcccagctaaatgttgaagtgttgcagtacccagtccttagggctcttcatttctctgtctccctgggcggtttcacaagtcctgtggctttaaatatcttttctaagttcatgactcccaaagcgatatcactagtctctgcttctcttttgagatctaaactgacatctaactgcctacctatcatttgcaaagctacaggacttgtgaaagctgtgtccaaagctacatccttacctttctcgtgaaacttctctgctttctgtcttctcccatctgtaaataaaagtgtcaccgacatgcacccacttgcccccctaacacctgggaatgaaccatttgcatttctttccctctcatcctgcatccatcagcaaatcatagtggctcttcagatttatccaggagctccccgcttgttcgcacactccgtcaggccagctcactgtagtcgaggtcttcattcgtctttcacccagactatcgctaatgcctcctaactggtttccttgttttcaccccagtctctctacaacctctcctctgcacagcagcaagagtgatgtgaattttaacagtttcctactcagaagcctccgagagcatttgatctctctctgttcattcaggctactctaacagagtactgtaggctggacaccttataaaccacaggatttgcttctcgtagatctggaatctaggaagtctgaaagcacagcgatgaccagctcagtgtttggtgaagtccccctccccgcttcctagatgtctgtcctccaccgtgtcctcacagggcagaaggggcgagtgagctgtaagatctctgtttataaggacacttagctcatttgtgaagacagctctcttgccagagccatcacctcctaatactatcacgttgggtgttaggattgaatgtatgtattttgcaaggatgcggacattcagcctcaggcaccatcagtgggaacagcatccagagtccttccctgccatagcccacaggatcctctgtggcccctcttcacctctccatcctcttcttcaaacacaccttgaaaaaagttgggttcattactaccatggcgctttcacacttgttcttgcctctttactattaacactcacccgcccaaagatgcccccatgatttggcccctcacttcatctgtggttcctgatcccctcatgcactttgtttttcttaatagcactcacaatttattatacgtttgttagtttgcattcccactgcagcgtaagcatgaggaaggcaagaacctaccttcttcattgctgtgtccccagcacctggaatatggtgtttttaataaatatttgagaatgactagattgcattttattttttaaaaagttctcttgtgcagagtcttcagaaacttgatgaaggctcagcagtgtagagtgtgtccgtgaagagggaaggagcgttagacatgcaggggaagagctggccagatgtgtgttatcacgggggcccaggagtggggtctgtggctggggaggagggtgtcaggcggggtgaagacagtattctggtctgtgctggggtaactgagagagcgggtccagtgagccaggtgagaatcataggggagacacctaacctggagaggacctttaggaaacagacgagtggttacgggagtggagtggatctctagcttgaccaagaagaaacgtgggtttcagtgctggtgattgtgtaggcctttactctcagttgatcagctgcgagagaaatttgagcagaggcatggcattatctgacatactttttgaaagggtcaccttagagtcagagatgagaatgcactgtaggaagacaagggcagaagcagggagatcggctaacaagctattaagggagttccctggcggcccagtgattaagactccttgcgcccagtgcaggaggcacaggttcaatccctggtcagggaactaagatggcacatggccataccacagagctaaataataataataaagcaatacatactttttgaagaggaagctactgaaatcatactcattttccactagaagtaattttccactaccagataagacccatcaagagagagatttttgtctgtctgaattactgacataagatcaccatttatagcagaagttgacatatactgcagaatagcaaatggctgtctggggaggccttacaaatagctatgaaaagaagagaaacaaaaaacaaaggagaaaaggaaagatataagcatctgagtgcagttccaaagaatagcaaggagagatatgaaagccttcctcagcgatcaatgcaaagaaatagaggaaaacaacagaatgggaaagactagagatctcttcaagaaagttagagataccaaggaaacatttcatggaaagatgggctcaataaaggacagaaatggtgtggacctaccagaagcagaagatattaagaagaggtggcaagaacacacagaagaactgtacaaaaaaagatcttcatgaccaagataatcacgatggtgcgatcactcacctagagccagacatcctggactgtgaagtcaagtgggccttagaaagcatgactatgaacaaagctagtggaggtgatggaattccagttgagctatttcaaatcctggaagatgatgctctgaaagtgctgcactcaatatgccagcaaatttggaaaactcatcagtagccacacgactgaaaaaggtcagttttcattccaatcccaaaaaaaggcaatgccaaagaatgctcaaactaccacacaattgcactcatctcacatgctagtaaagtaatgctcaaaattctccaagccaggcttcagtaatacgtgaactgtgaactccctgatgttcaagctggtattagaaaaggcagaggaaccagagatcaaattgccaacatccgctggatcatggaaaaaacaagagagttccagaaaaacatctatttctgctttattgactgccaaaagcctttgactgtgtggaatgcaatcaactgtggaaaattctgaaagagatgggaataccagaccacctgacctgccttttgagaaacctatgtgcaagtcaggaagcaacagttagaactggacatggaacaacagactggttccaaataggaaaaggagtgcgtcaaggctgtatattgtcaccctgcttatttaacttctctgcagagtacatcatgagaaacgctgggctggaagaagcacaaactggaatcaagattgccgggagaaatatcaataacctcacatattcagataataaccaccttatggcagaaagtgaagaggaactaaaaagcctcttgatgaaagtgaaagaggagagtgaaaaagttggcttaaatctcaacattcagaaaaggaagatcatggcatctggtcccatcacttcatagcagttagatggggaaacagtggaaacagtgtcagacttttattttggggggctccaaaatcactgcaaatggtgactgcatccatgaaattaaaagatgcttactccttcgaagtaaagttatgaccacctagatagcatattcaaaagcagagacattactttgacaacaaaagtctatctagtcaaggctgtggttttaccagtggtcatgtatggatgtgagagttggactgtgaagaaagctgagcactgaagaattgatgcttttgacctgtggtgttggagaagactcctgagagtcccttggactgcaaggagatctaaccagtccattctaaaggagatcagtcttgggtgttctttggaaggaatgatgctaaagctggaaactccagtactttgtccacctcatgcaaagagttgactcgttggaaaagactctgatgctgggagggattgggggcaggaggagaaggggacgagagaggatgagatggctggatggcatcactgactcgatggacgtgagtttgagtgaactccgggagttggtgatggacagggaggcctggtatgctgcgatttatggggtcgcaaagagttggacatgactgagcgactgaactgactgacacatattgggttctcgacttttttttttaacttccagttttattgagatttatttgcatttgggcactgtataactttatggtgtatggtataatgatttcacttaaatacctaattctataattagcacgatgtaagtttagtggacacgcaccatctcatagatacaaactaaaagaaaagtacttttccttgtgatgagaacccttagcatttattttagtgatattaattgttgtacttcacatccctactgcctatttatgttttagctggaagtttgtacttctgactgctttcatccagttctccctccctcagccccagctttggtaaccacagatctgatatctttttcagtgagtttgtttttgaactgcagttgacctaggacccagtgtgggtgctcagcgcttgacagagtgagtctgtgcttctgtgcactacccaagggtcgccatgagtggctggttgcggtctgtcagccaggcagcgacagtctgcttttattggttgggtccccctgctgtgtatctcctccccgtgactcatctgtttataactgaaggtttgtgcctctgaatttctttcccctgtttcactcgtcaactggtctctctcccctggtaaccatttgtctcctgtgtctgtgactctctgttttgattgtgcatttgttttgccttttagattccatatataagttagggcatgtgttatttgtcttgctttatctggcttatttcccttagcataatacctctgggtctgtctctgttgtcatgaaaggcaatatttcattatttatgactgagtaatactccattgtgtacatatatactgaatcttctctgcccgtttgtctgctgttttcgtatcttgactattgtagataatactgctatgaacattggggtgcatagatcagtttgaattaatgttttcattttcttcagatacatacctagaagaggaatgtttggatcatatgctagtttcgctttatttgaggaacctcctcactgctttccatggtggctgcctgaagttacacccccaccaagagcacacgaggatgcccttttcttcacatctttgccaatacttgtcctttgcttgttttttttttttttttttaaataataaccattctgacagatgtgatgtgatatctcatcgtgattttgatttgcattttcctgatgattagtggtcttgaacatcttttcatgtgcctgttagccatctgtgtgtcttctttggaaaaatatgtctattcaggttctctgctcattttttaatcaggtggtttgtttttttggtattgagttttatgagtcctttgctatttttagatattaaccctttaccaaggtatatatcatttgcaaatatctttttccattcagtaggtaactttctttgttttattaatagttttcttcactgtgcagaagctttttagtgtaatatagtcctgtttgcttattcttgcttttgttcccttgcctgaagagacagatgtaaacatgtgctgcttagacttatgtcaggtagtgtgctgccttcgcattcttgcctttacatgcttaatccactttgagtttactcttgcatatggtgtgagtagtccaatttgattcttttgcatacagctgctcagttttcctggcaccgtttattgaggctatccttttctctggtgtatactgcctcctcggtcatacagtaattgtccgtataagtataggttcatttctgggctctctgctctgttggtctgtgagtctgcatttgtgctattactgtactgctttgagtactatatctttgtagtgtagtttgaaatcagggagtgtgacccctccaggtttgctttttttcatcaaattttttttttctgctatttggtgtcttctgtgtttccatacaaattttggaaattttgttctggttctgtaaagaaaggttattagtcttgatagggattgcattgaacctgtagattgccttgggttacgagttcattttaacaatattaattcttcaagtctacgaacacagtgtatctttccatctgtttatgttgtcttcaatctctttcatcaatgtattatagttttccaaatatagatcttttacctccttggttagattcattcttagatattttattcttattgattcaattgtaaattagattgttttcttcatttctctttctgagagttcatattggtgtatagacacagaatagatttctgaatattaatttttttctgcaactttactgtatttattctaatagccttttggtggcatttttaggattttctatatataatatcatgtcatctataaacagtggtagctttacttcttcttccttcccaaaaggaaaaagccttctgtttcattttcttgtctgattgctgtggctaggacttaaaaatagtctgttgaataaaaggagtgggagttgctatccttgtcttgttccttaccttagagaaaatgctctaagtttttactgtttcatatgatgttagctctaggtttgtcatacatggcctttattatgttgaagattccctctgtacccgttttattgagaatttgtgtcataaatggatttgaattttgtcaaaacctttccctgcatctatcgggatgatcgtgatttttactcttgtttgttagtatgatgaatcacattgactgacttgtggatatcgaactatccttgcatcctttagagaaatccattttgatcatagtatataatccttttcgtgtactcttgcatttggtttgctaatattttgttgagaacttatgtactgatgttcatcaatgatattggcctttaattgtcttattgtgtggcatagttctctggtttcaggatcagggtaatagtaaccttgtagaatgagttcttgaagtgttgttgctcttcaactttttcaaatagtttgagatggataagcattaactcatgctgaaatatttggtatacttcaccagtgatgccatctggtcctggacttttgtttattgggaggtttttaaattactattactgattcattttcatttctgataattggtatgttatagtttctatttcttcctgattcagtcaggatattgtatatttctaagaatatgttcattttttctaggttgtccatttgattggcacataatatcatattagaggggcttccctggtgactcagatggtaaagaatctgcctgcaatgcaggagacctgtgttcaatccctgggttggggcgatcccgtggagaagggaatggcaacccactccagtattcttgcctggggatttccatatacagaggagtctggtgggctgtagtccatgaggtcataaagagtaggacacgactgagagacttaacctgaacacagtgtcatattagggtttccagatggtgctagtggtaaagaacctgcctgctagtgcaggagaggtaaacaacgcaggctcagtccctgggtggggaagatcccctggaggagggcatggcagcccactccagcactctttcctggagaacctcgtgaacagatgagcctggtaggctgcagtctataggatcgcaaagaatcagacacagctgaagcagcttagcatggagcgtgtgcaatgtcatattattatcaattctcacttctctttttatatttctgattttatttatttgatttttctcttttttttcttgatgaatttgacctaagggatatcagttttgtttatcttttcaaagaatgagctcttagttgatgttttctaggctttttaagtctctatgacttttctaatactaaatttggggtgttgttgtttttctagttcctatagatgtatggttaggttgtttatttgagatgtttcttcttttctgaagtaaggttgtgttgctataaacttccctcttagaactgcttttgttgtgttccttagatttttgtaacttcgtatttctgttttttttttaatctccactttaatttcttcagtgacccactggttatttagtagcacagtatttagtttccacgggtttgtaggttttttccttttagtagatttctagtctcatagcattgcaatcagatagagtgcgtgatctgatttcagtcttcttaaatttattgagacctgttttatggcctagaatttgacctctcctgggaaagacatagaaaacaaacctggggttaccaagggaaaagggaagaggagctgttcagtccagttcagccgctcagtcgtgtccgactcttcgcgaccccgtgaatcacagcacgtcaggcctccctgtccatcaccaactcctggagttcacccaaacccatgtccattgagtcggtgatgccatccaaccatctcatcctctctcgtcccattctcctacccccagtccctcccagcatcaggatcttttcaaatgagtcagctcttcgcatcaggtggccaaagtattggagtttcagcttcaacatcagtccttccaatgaacacccgggactgacctcctttaggatggactagttggatctccttgcagtccaaaggactctcaagagtgttctccaacaccacagttcaaaaccgtcagttcttctgtgctcagctttctttatactctaactctcacatccatacatgattatggaaaaaccatagccttgactagatggaactttgtcagcaaagtgaagtagagctactgtaaaggcggatgctatcaaagtgttgcactcaatataacaatataatatgttaacaaatctggaagacccagcagtggccacaggactggaaaaggtcaaccttcctcccagttcccaggaaggtagtactgaagaatgtgcaaaccatcagataggtgcactcatctcccatgctagcaaagtcgtgcttaaacccttcatgctggtctttagtggtacgggaaccaagagcttccagatggcaaagctgggtttagaaaaagcagaggaaccagagatcaaactgccaacattcgcttaatcatagagaaagcaagagaatttaataaaaacatctctctctgttttattaactgtgctaaaacctttgactatttggattataacaaactgtggaaagctctgaagagatgggaatatcagaccaccttacctgtctcctgagaaacctgtatgaggtcaagaagcaacagtcagcacccctcgtgaacaactgattggttcaggattgagaaaggagacagggctgtctgctgccagcctgtttatgttacctatacactgagcgcatcaggagaaatgccaggctggatgagttacaagctggagtcaagacaggcgggaggaacagcaacaactgcagatatgcagatgacaccactccagtggcagaaagccaagaggagctaaagagcctcttgatgagggtaaggaggacagtgaaagagccggcttaagactcaacgttcagaaaactaagatcatggcatctggcccattacttcatggcagatagaaggggagaaggtggaagcagtggcatcattttgctcttcttgggctccaaaagttgctgtgaacagtgactgcagccgtgaaatcagaagactgcttctcggcaggaaagcgatgatgaacctagacagcgtgttgaaaagcagagacatttctctgctgacaaaggcccacatagtcaagactgtggtcttcccagtggtcacgtacggttgtgagagctggaccgtaaagaaggcagagtgccaaaggcaggttagatgccttctaactgtggtgctggagaagactcgtgagagtcctttggacagcaaggagatcaaaccaatcaatcttaacggaaatcaaccctgaatactcattggaaggaagctgaaccgccagtattttggttacctgatgtgaacagctgactaattggaaaagtccctggtgccaggaaagactgagggcagaaggagaagagagtgtcagaggatgagctggctggatggcatcagtgatgcaatggagatgaacttggacaaacttcaggtgatgatgagggacagggaggcctggcatgctgcagtccattgggttgcaaaaagtcagacaaaacaggagctcagcaacaacaacaacatgaagtaagcagtttgcttctttacaagatataagcacaaagacctgtacagtggtaatcaatgcagtatcatgagtaataacaaagggaggagtctgactgcacccacaataaagaatgggttggatcatgatacatgtgctcagtggaatactgtgcagtcacaaaacaagagaaggtatttctgtaaatgctgatttagaatattttccgttttagcaatcatgttgttgaattttaaaatgcatgatacagtatctccccatgtctgtttttaaaaggtgtctaggtgcctaaaaatgcctctgtgttatggaaacacacaaaagagttacctttgggagggtggattcagagggaaattacttctcactgtatgtctcatacatgttaaaattgcttttcaccttgcaaacaagccactcaaaataagcaaaataataacccacatagctttttctgtaattacaggacctagagaaattctgggagtgaaaaccgcagtgagataggaggctgtggtcagagtggcatttccgccttggagactggagattcgtagcttcacagactagctttcagccacggtagctgctagctgatgtggaaaggaaatgagtgctgttgatgaaaataaatttgaagtattttatgggatgtttttgtgcttcatatttgagttgctttacgagcagattaatttatgaacatattatgtaccatgatgccctcagtaagctagacttcattgagtttctgttctctccgtgagccgatatacaatcctagacctcataagtctttctaaaatcggctgaccaaaagtggcaattaatttttctttgtaagttcttagttctttatagtttccttaatgagtttccttgaaaggaagcactctaaatcttgtagggtcctgtagttgtaattaccactgtattgtaactggagtactcatgaaattgctgatcatgatttatcaaagtaagtccttcagaaagctccgtttcttcaactctgaaaaactcgatgaccacacggatgatcgcaaaagtagttaccatgcattctgaatcctgtgactcggacacagatgtgcagaggtatttttaaaatataaatctgggttagatgtctttttggacttatagaggagaattcaagaggagcatgaaaaagcagagggaactctgagcttggagctgaatacatcttcagtctgtttctggttggggtgtgcacgggcctctgctgaggcgtctgtaacaagtggctgcctgcccacccactcagacccgtcactctctactgcagggtgagcagagtaacgtcctgtctctgaaacatgcagtttctccacgggtgattcatttccacatgtattccagaggctgctcgaagaaatattgctcttggagagttaaggctcgtttttagatcatgtatttgatagcacatctagaaatcaagaagtcatataaggcatgatacttgccataatcattacagattataacatcttctatgcataagaaaatactttttttttttttttgcttagtgtatattcctcttcttaaagacataagcacaggcacacagttgacggtgaagttgtttagacactgagcttcagctgtcaggagagagctagggtcaagcggagccgcccaccctgccctcttccgttcccattttgcctccactggtcggggagtcaccgggacagttgggttggatggggagtgtgactgccctccttccttgctgaatccctcagtctgccctgccccctcgaacgcatctggtccccgttcagacacatgcctctcctcattcacctgcactaatgggtgggaaccagggcacatgtaatcccaaatggtggataatccaaaagcaattaatacttggctttgaaatgtattcagtggtgttttgaattgttcttaccttcctaattatattgtgctaatgttgccattagttgggattccctgaacataccctgggtgatggggacactcggtggggaggggcaagtgaagcggagtggcagtgggaagcccaggctgcagggctttggattcagagtttgctttggatgttaatggttgaaagctgtcagcatgtcactgggtccagggcccagcagagtacctgctgcacagttgacgttcttgaggaagcatgtgttcagtgaaggctctcagtgtttctcatagtcgccttacctgtggtctgatcagggctgggatgagcccgcagaggaagtcagtgaagggtggccatggtgtcctccccagcccttccgcccccagcttagcagagatgagtgctgccaagccgtggacatttttccaatatggggctgacgttataggctgtttcgccggctgggccacaaagattagcccctcagtagcaggcacttaattcagggacccttgtcaggaaagaagctatgctattcctttaaaatgcaaggagatactttgaaataggcacaaagaagctatgtattcctttcattagaatatagctttccattgcaatacaagcctctaaagtaaaataacaataatatagagcatgacttcttactttaaggtccatggatcagccgaactcctgaaattgcttgcccatgagtgtgtgtgtggatgtatgtatattttagaggagagggttcataaacttgattaaagcctcagaggcctccacagctcctctctgatcacataggggattgaatttgtttcactatttcgtgcttttcataaaattttgttaagaggcaaacagtacacgaggtgcccctgcctctctatcttgtctggctttggaaacaaggttgttgtgaagctggaactgtagcttgttctagactggatacaggcacaggcccaacagccgggtgtttacatacaaagactgaatgtgtaagtgggaaacagccaggcagtctagaacaagagattgctgacctgtgtgagaagccaagccaccacctttacagcaaaataaactcgaaacagtcaggatttggtcatggactgccagctcctatatttttgcctgcttccaactcaggaccaactagagaaagctcacgtggtccccagatcagtcacaaatgactctctccctcttgtcagcccaccaccatccttccagcttccagtccagcagacttgaagccttctctttgttttactacgaagctttctctctgccctgactgcttctgatcctttgctgaaagcaggtgatggtagctgattcccttgctatagcaagctttgaataactagtgtctgcttgtcctcattcaggtggtgttcctttgcttcaactgtgcatggagatttgagaggttccagggaaacgcccttttcctggactctcttccaccgggacattgtggatggtagtagtaccgttggggagcactccttgtagagtttagcgctttattttttcaggtagaacattctaaagtcatgttttattttagagacagatctctctgagcgcagaaccttaaggtaagaatggattacaggtagcacagaaaacaccaagtggatgaccattcagccaggcccccaggattgcagggcttctgcgtggggcggaggaggatgcctttcaggtcctggcagcactggggtgctctgccccctgtgtgcactggatacccccgacacacactatgggctatgtctctgcacttagatagtcacccggctcctgccacctcccagctctctcacctccttaaagccaatcacgagagcactcgggagagccatcagatcaggactggacacagagggccccacacttagagtgttcagtcaaccgtcagctgagattgtaggtaaccgtcatagtaagtttatattttaaaaactgtgacctgtaaatgttaacttttaaaatgtcacaatgtttatgtcttgttttggcctttcttcatcttgtgatatcagttcagttcagtcgctcagtcgtgtccgactctttatgaccccatgacctgctgcatgacagtcctccctgtccatcaccaaatcccggaatttacccaaactcatgtccattgagtcagtgacaccatccaaccgtctcatcctctgtcgtccccttctactcctgccctcaatcattcccagcatcagggtcttttcaaataagtcagctcttcccatcaggtggccaaagtatcggagtttcaacttcaacatcagtccttccagtgaatattcaggactgatttcatttaggatgaaatggttggatctccttgcagtccaggggactctcaggagtcccttccaacatctcagttcaaaagtatcaattcttcggcactcagctttctttatagtccaattctgacatccatacatgaccactggagaaaccatatccttgaccaaatggacctttgttgacaaagtaatgtctcttctttttaacatgcttcctaggttggtcataactttcgttgcaaggagtaagcgtcttttaatttcatggctgcagtcaccatctgcagtgattttggagccccccagaattaagtcagccactgtttccagtgtttcccatctatttgccatgaaattatgggactggatgccatgatcttagttttctgaatgttgagctttaagccaactttttcactctcctctttcactttcatcaagaggctttttagttcttcactttattccgtaagggtggtgtcatctgcatatctgaggttattaatatttctcccggcaatcttgattccagcttgtgcttcctccagcacagcgtttctcatgatgtactctgcatagaagttaaataagcagggtgacaatatacagccttgaggtactccttttcctatttggaaccaatctattattccatgtccagttctaactgttcctccctgacctacctacaggtttctcaagaggcaggtcaggtggtctggtattcccatctctttcagttttccacagtttaattgtgatccacacagtcaaaggctttggcatagtcaagaaagcagaaatagatgtttttctggaactctcttgttttttcatgatccagcggatgttggcaatttgatctctggttcctctgcgttttctaataccagcttgaacatctggaagttcatggttcacgtattgctgaagcctggcttggacaattttgagcaccactttactagcgtgtgagatgagtgcaattgtgcggtagtttgagcattctttggcattgcctttctttgggattggaatgaaaactgaccttttcagtcctgtggccactgctgagttttccaaatttgctggcatgttgagtgcagcactttcacagcatcatgttttaggatttgaaatagctcaactggcattccatcacctccactagctttgttcgtatacttggaatttaaaaaaatcagaatggcccagtttctcccaccctccactgggccttctccctctctctattgtctgtgtctcccctttctattggatcgtgtttatatagtaacttctctgcggggagaggtacagatgtcagtagagctgggatgtgaagagaggttgggcttcctgtccccccattagatggttagtgggcgtgggtccagtgaccacacctgttgggttaactgactagaagaccccaccccggcctaagaggggatgggagcagaaaccagaacctcacctagtgattctcacactgtgatctgcgatcagccgcatcaacagctccaggaaactagcttgttcagaatgctaatgatcaggacacatctaagtctcagaatcagaatctgagacttttagcatgggctctaacagtgtgttttactcagcctccaggcttttctgatgcatactaaagcttgagaccattactctaattagaagagccaaccaatagtttaagtcttttctctcctcctagcataatgtttcataggaacgcatggtgggtttaggagcgctgacagctggcagcaaaatgaattggagaccgagaatgatcacctcatctgtggctcccaaaacctagtacacacggagatctcctgaagccttgtcaaagcgcagagtgcggtccagcagcactgtggtgggcgcctaggagtcttcattcttccggaaagctccccagtcatgcgtccggtcctgggatcccacttgtgcgggcagagtcctagcagacaccaggccaccagctgtggtgcatccaaggcgcaggcaggcaggaggccagggttccggaactgaagggagagcgtcctagcgggcctaggcggcctcggtcgattcctccccgggtgtgatcactcactgctagtgtgtgttcccagggatccctccagagatgagggccgcacaggggaacgtctgacgagcagccggggaaccctgtgagcggtcaccgatgcaagcgcaagatccggaagatccctggttaataagagcgggcctgggaaagggcggttcttgtcaattctggttttgtttttatttttgcttttggctccacagggccttcctcgcagcatcgggcttcctctggttgtgtgcttggggttctcggggaagcccaggctctgaggcgctcagcgttgccgcactccggctggcggctgtgccacccaggttcagctgccccgcccagggtctcagatccccgcccaggggtcaaacctgcgtcccctgcttcgaaaggtggattcttaaccagtgggccaccaaagaagtccctattcgtattactttaataaacatttactgactcctgtactctgtccaaaaccaaataaccccatggagcttgtgatctgctggacaagatcacaagggaagaaaaagagaagggaaaccaaaccaaactgtcataaccttttagctgggattttttattggtgcctttatctctggtcactgtgactgtggagcctagtagatatggagtctgcaaacgtcaggcctgagtcttgcgcttgtcctaacctctgaggggccaggcagggttggtgccccttgtagggtgggggtgggggagaaggaagagagggtccaagaaaaccaccctccagaaggtgttcgaagctccctggcagcggcaggccgtcgcatggaaccgtcaccactgctgcctccgaggaagggctcagtatggctctcctcatgatgtgtgagcggcctgcaggtgtgcggtccagcttcctaccgagtcccatggaccctgacgtttcctagcttagggttaaacctcatgtcagttcctccaacgatacactgtatatgagtgcattcggagatttaagcagaggaaactggaaactgttactcagtgaggctgattccattgctatatgaaatagtctgtggcagtttcaaaaaaattaagtcgcctaagtgttgttttttaatgagtttcatattaggaaggataggagcaattagcttcaggaagcctcggtatgctctttagaacactgactcgctcatagctccctttcccagagataaagtgacagaacaaagcctactgatagacttcctagaagtaaaatttgtttgtagtataaacaaaaactagttttcacagagcctaaatttaattactccagtgtgaccaccaaccgtccgtcagttcttcgtgctataatttataggtcagtgcggcctgcaagtcattttcaatgcgcagtgcctcccctgtagtgaagcccaaacaactgatcggacagggagactgcttctccgcagccttgacccccgcgtccactcaagtcagagcgggggttctagctgcaccccgggcacagtgtgcagtagtgagagcgcagtctcatctcagaactaaagcagtattggactacgaccgtccttcagtagatttatctgaacttgctggtaaatcgtacatcctaaagtcgcacagtccgtgaaacaccacgcttgtaatccaaatggcaggtctgcctctgaaagagggacgtgtgcatgcctgtagacgtgcggtggtcattctgtgccccacgcgctcagagcatcttgtccccctggaaagccatggacgcacaaggctttgcttcccatgcaggctatttttgccaagggtgtattgcagttgttttgacaaaatagcttcaaacccttgccaaagagaataaattgcagtagaaatggtgataattattaggaacttatttttggaaacagaaaccttccttaataaggggctgtgtgctaccctctgaaaggaacagggaattttccccaaagtcagaaatatacttttaacagttactgtacttattctgtggagattaagttaggtttagcatgttttcccagaaagccaaattcaagctggttcaaccgtgtattataaggagtgcttagaaagtagatttgagttctttaaagataataattaatttgaagttacagtttcttgtgtttttatagtggagtttgatggacatgaagtattcacatgtttctgtaatatatgcagatctcaaatatttttaagaacaaattgatatatttgactaggtaaaaaaaaaagtagcaaacaggctaagcatcttctaataatttattctgcagagctgtaagaataaatgggaaacgagaattttgccgtccattgtttgtacctttgctctccaaaggagttagatgagaacgccttgtgaccctaattataataacctcagtattttattgtggctttaagactgctttcacagagttgacataaaggaaaactcgaggtaaattaattcagaggaactgagtgcagaggagcccagtagaagaggagcctaagtcccgtcaaggaggcgacaggcgcaaagaccaggcctttggctacttctggttttctctgatgcaaacaccacatttggattctgtgttccttccccactagtcatttaaacattgttacctttgaaaagcccaggtgaacgaaaacaaaagattaatatcattaagcaaaaatctatctgtgcttttgtgttcttatattcttacccagtgctatcatttcatgatcacaggttacttaagatgccctaataatgtttgttacattaagttgaatataccttttccatttcacttgttcttctgaggtggctgtacccatatctcggaagaaaaaaaaaggaagatttagtatactgattgctttctgcatacataacccaccacagccatgttggagcaaggctattttttaaaacctcagtcaaattggtcattttcataagctgatcagtaaaaagtgtatttttcttggtgtttccatgggtcattcactaagcaataacaccatcaggagttactgatcccaagggaataacggcttaattacacagaaatttaaaaatgagagtagtgttgcatgagtacagacatagagactgtcctgtctttgggtggtttattattaaatttaatacatcagatggtctttttggtttgtgcagattttaattactaagtaagtctggtaaaatatgaattattgtattaacacaagtgataaaacgtacatggttacgagcattgcaatctgtaggtgtaatgtacataactcgagattaatagtatcaagcaattaaactgaagttaaaagaaggtttaatgctacccttaagtgtaacttaaactctcgctaaatatttctaactgcaatgaaagcatgttaattttaggagtgacttcttttacaagacctcatttcttagagtacgttttcctttctaagaatacaaaagcacactgaaatactttctgctggtaactcattccataaagatttttttttcttggcttttaagctcaatgaagaaagcccaaaatagcacaggaagttttgtgtggtgaatatatgtatgaactaaatctagttggggtaaaagtgattaaattattgataagatccttgttgctcccaaagcgtttcattagtcataccaggacttcttaaatattttgagaatttggccttaattttcctataagtgcatattaaatagaggaaaatatattttgctttaatttaatatccttatatgtacaacccattaagagtcttatatattgtgcttagttgctcagttgtgtccaactctttgtgatcccacggactgtagtctgccaggttcctctgtccatggagtttgtcaggtgagactcctagtacgggttgccatttcctactccaggaaatcttcccacccagggatcgaggctgggtctcctgcttcggcaggcagactcttgaccgttgcatcccctgggaagcggcttggtcagaaggttcctttggattttttataacatcgtacagaaaaactgaacacattttttggccagcctgagaaacatgctaggcatctactaattaattctttccttctgtgtttccgggtttcccccacttcctgaattatttttaggttgccactaacaagatcaacgcctatatttccaatttggctatgtctttgcttctaggtagcatgacaggtgacattacagtgagtttaacaaagatcttggtgaacatgtaaaacactgagcaaaatgttctcttacaaagaagaactcgctggctctgtgtgtgagtgtgtctgtcagtgtctctctcatacacacacatacaccaaatatggtctttgccctggaattatttaccagtgtacttggcaaggtgaaacctaaaagataaggcaatgtggaacatttatgaagtggcgcatcacagcttccacattaaatagagaagcactgaagactcgtgtgctgtggtcttgaaggtgtgttttattcactgtcgattgctgggtgtctgagccccctgcccgaccgcactgcacgtgtgtcgtagcagagtgggttccaaagctaggctagtgcaacccagaacggcaggcacattgtaagacaggaggtttgggcagtaactgagcattttgtcacaaaaatagtaaaactatatattatttctgagaagtaggctcctttgtcttctctgcattatccgtgatgaagccaaagatacgattgtccctgaggaaacaagaggagtttggactttaagttagaggggaaagatggcattgcatttttgtggcatgtattaacctttattagttctttactttttttgacaaatgacgttttttgtaatatgatacatcacctttttttcaaaaggcattttactttccgtagaagataacaggaaaaacacacagaaaaaaaaatgtccctccacataaggcctcacagaagcagtgtctctggggaaactgcagcaggagttaccatgggcttattcaaataagggaagcatggaagtcagctccaggtgggaagggggtaggttcagggcctaggattacgttgttggtgagtttcatgctggcatccggatttgaaaccaggaggaatcactttaatgtcagaatatgtaattttcaaagtgccaaaatttacctatccgtcaaaccaagataattctcaagtttatttatttacttctatcttccagttgtgttgagatataattgacaaataccgttgtagggatgtagcagacatcattgtatttgatgtaggtgcatgttgtgaaaggaaattaacacagccatcacctcacgtgcttatctttattattattattttggtgagaacatttaagttctttctctctcagcaaatttcaattacacaacaccctgttaccagctgtggtcaccatgttatacattaggtcctcatcagtttttttcactgatggatttttcttcagttgtgtcagttggataactgaatgaccatgatctaagtgattgtaatcacttaattttgccgatacagttatcagtttaaaggtccttttaacaggtccaccatatggtttaacccaggtgctttttgctttgcccattctttgcccattggttccaccaacactcttgaaaaagcaattaattgtttttaattaagaagagcaacctgtgtaatttagggatattttggtgcttcttaaaatagtaaatattagcatttgtaatttaaaagaattagaagtgtgtatagaaataatgttttattctaagccacataaatataggcatactagagaaaccacacatacgcagttgtgttagcagcctttcatattagcagtggggtatgaattcaaaggtggatgaaaattgtaagcaattctgtaacatttttaaatgctgatgtcacttaggcgttaaatttctttcctgaaaaattgagtaacataatttaagatgtggttgaaaatataatttaatttttctgctgattaatttggtaatatgaataaaggaattcaagtatttgatggtatggctcttaataaactgatatgtctgtgtattttacactgttttgtcacagctttttgattccttcttaaacgtaatactccctgaaaaaagtagtgtctgatttttttttttggcctcactttaacctcacagatggttatatttggttttgaattttgcaaagaggtaatatctctgaactaatctttaaagaatggcccctattctgtgctatttcttggtactagaaatatagaatttttgagtctttgttgtgtgatagaatcacatagatctctagcttgagttcctagagaaaggcttgagtaaaggaattatagccatgtatataaaattagaagtaaatggataaaaatatatcaagtgaactgttttaattttcttataagaattagatatcactggcttagcatttgtttagagtctgaagtgttactatttatgatgtatatttacagacaaaccttgtttactattcttgttagcttcttggatctgctctgtagcatctgtgtccattctcctggccatagaagtgactgtgttttgaaataatacccctagaaaggtaacctccttgataagttattctgaagttaaaaatcaagtatcattatatgtttcatttgagataactgtctacgcttgacaaaaaacatctgtctttttttcacatttaattttaaaatgaatatttttacataggagtgacatgtcagaatgcagttttctgtttgactacagtaattcgtcgtatgaccatttgcaaaagtctagttaacaaaaaaagtcagtagtgatataaaattttggaacattattatttaattcataaccttacaaatgaggtaactatcagactaccttcatttttctccttgcctttttgagatttatgatttctaatgcatatgaaagatttctacccttttcaaatattgtacttgtgttgtatacctatatgaacaaagtttaatgagtgtggcctcattataaaattacaaaatgcagttgaaagcctaaaacttggactttactgtattataattttttatataatatttgctcggtgtgatcagttaaaaattatgattttttcacagctacaggagaagatgattcctctttacattgctctcaacagtactgtctcctgaattcagcttttgtttcccgcagacggtgggtgcggctgctgttcggccgagagttcccgctgcaggacctcctggtggtctgggacgccctgttcgcagacggcctcaccctgactttggttgactacgtcttcgtggccatgttgctgtacatccgagatgcttgtaagtgctaatggccgtgccagcatgcagtttggcggtcctgagttttaaactgtgtctcttaaatgtactttaccttttattttgaattaccatgcctacatttttatcataggcagtatactggaagtttcagaggaacatactaaatatatttttgtgagttaacatgtatgtatcagatgtgggtaattttatcctgagagaattggaatattcttcagaaccatttttctaaagactttcctccggctttgatctcgtcattacacacatttgtgaagcatgcatagaaaaagccagtgtttcagatatgtttagagcgccaccttctgacaggtagggagtattcaagaatatttatcagaagataggagctgtttttatagtatcaacaacttgccaataaaaaataaatactgcatttaaagatactctaacttcttagttaaattttgaccagacgtatttctcaatggagtgcccagtggcagatgtattcctgtctcataggatctacctttcggtgcttgcctagctggaaagcctgagcctgcccctttggaatagtctgataatcctcagcttgaagagaaaagcagagcatgttttaaatttcagaatacctcaaattgttttccttttcaaaaggaagaattcacaaaaccagatttgtaagccaaaatgtaattaggaatgtttgcacaaagcgatgatgaagtaggaaataaaaaactactgtaagagtgggactttgtcagaagaacatgagactatttggagccgttcataatcttgactgttaaattactgtgcggttctctgtttattcattagatttcagttgtgccagatgctgttgttatccctctggtaaaactaataatattctttaaattctacattacacttttaagattcctcccaaagtacttgaatgaatgaatgacgggagcaccacattttatccaaagcttgtcattctattctgtaccttgaaggtcagatagttcgggttttgacatacaaagtagaaaattctttctttctgagtaagaacatggaaatcataagaggaaataacctgggaagtagaggagaatgtttggttagattttaggatatttaatgctaatctcccactgaaaaatagtatgatttttataaagtataagtaatgaaaaacaaggaaatcagtcctgaatatttattggaaggactgatgctgaagctgaaactccagtactttggccatgtgatgcagagagctgactcactggaaaagaccctgatgctgggaaagattgagggcaggaggagaaggggacgacagaggatgagatggttggatggcatcactgactcaatggacatgagtttgagaaagctccaggagttggtggtggacagggaggcctggcgtgctatatagtccatggggtcacaaagagtcagacacgaatgactgagtgactgaacggactacatgaaaaacaaaaggaatgagaagcctcctttatttaaaaaattacttttggataatattttcaaaaaatttttcaagccagacaactattggaatctattctgattttctgtagtcttaactaaatatttactcttctattaactattataaatcacaaccatatttttaatcaccatgtttcctatcctaagatgtggttttaaaaattaatttcagaaaacttggcgatttgggacagctgaagcctttgtccatttttaagaccttatagaacacgtagacacaagtgaaagaaacatggaggtaatgaagttgtgtattttataaagtcctagttatttttatttgcttgtttaaatccataacaatgggtgagacttcctaaaaataggatgactatttgtgaagtatttaaggggcagtgcccctgtccttaggaagtttaccaactagtaggaaacattaattagtaggcctagtaatggtaggagctggtaggacaaggtctaggagaacatggctggttgaagtctgatgtttctggtcctgcggtggaggaggcagcaggagagttcaggagaggcgccaggctcccctctgggcaggcgtgtgacccgaaaaaatgctctagacgcaggtgagtgagatgaggggtctgcagcgtgaacagagaagctcgggagagacagcttcatggggggcgtgtgtttgttttcacaagctgcctggtttcctgagagtgcaaagcgagagtgacgcacaggttgtgagcatgagggagtcaagaacgaatcctgatgagaatcctcaccctggaggtgacgggaagccactgaaagggtcggagcagcggtgcgggcagtctcaggttcctctggctgcagggtggagcagactagaggcagacaggactggagcaaggaaatccgatgaaaggttacgaccacggtccaggggcaccaaacgggtgagggagaacaggaagtgcacagtgagccccagctgggagagcttagcagccgggtcgtccgtctgacctggaaaggaaagatgaggattagcaggttttcggaatggatatgactgtgtttcagctatgctgaatttgagagatctgtaagaaatcggggcttcctaggtggtgctagtggtaaagaacctgcctacaaatgcaggagacataaaaggcatgggttcgatccctgggttgggaagatcttctggagaagggaatggcaactgactccagtattcttgcctgggaaattaggggcagaggagcctggtgggctacaggccagggggttgcaaagagtcggacatgactgaagcagcttagcatgcatgcacttaggaaatcagtatctgaggattggaaaataaaattccctgtcagtatcaaggctacatatttatttttacaaattgtgtttgttacaaccacaacagtggatgtggtctcccaggagaatagagggaccatatatttgcagtctgtatggaacagtcttagttctatacactcactgttgaagagtagtaattattaacgctgccttctttcactctcaaaggcaccccattaagatcataggaattacatggtcagtttacctgaggtagatgctctcagaggaaaatgggtaaaggtgtttcatatcagtatttaagaggctccaggaacggaagaccttgtgttgtaacgcctcgaagctgttctgtagcgtcagggaggtaccgggtcaggagtgcaggggcacagtcaggtaaggctgggaaagtcctcctgtgaacagaggaacagacattggagacctttgccaaagtgggttccatggactgggggagcggaagctggatcatggtaggttggtgagtaactggacagctcagaactgcagtagcctcttctgcattccttttgtctcatgtacacattccattttcaactaaaagtagctaattgaaaagagtgtgcagatagcacgtgcagagtcatctttttaaaaagtccacagggaagggaagaagagagtcgcagttagaggtcagtggagggcaaggaaggtttgatggagaaggcagtggcaccccactcctggaaaacctggaaaaccccatggacggaggagcctagaaggctgaagtctgtggggtcgctgagggtcagacacgactgaacgacttcactttcacttttcactttcatccattgaagaaggaaatggcaccccactccagtactcttgcctggaaaaccccatggatggaggagcctggaaggctgaagtccatggggtcgctgagggtcggacacgactgagtggcttcacttgcacttttagagggagccggtcccagctcccagaggtgtggagagctggtggagaggtgcttctcaagccagtcgagcttctccttcagagatcagcactagtatttcagtctagtgaggaggatctatgttattgaaagctgcgttgttcatcactggttctgaacaccgcctcctccactgcccagtctgtcttggtgggcctccgtatcccagcctatagaactggacccagggcatagtagtcctcctgacacatatttttgggggaaataatggaagaaacaagggcctggaggcagtggcgtggtatcaggagtgcgtggaaggaggtgccagtttctggagacagtggctggcagggtcactcagcgcctgataaaggatgaaacccgctgtctgtgtgagcagggtggggcggggctgggcccgggaggtgtgggagcggctgcccgagaactcgcgccagcccctggagctgtcagggagcctgtggggacaccctgggccctggcacctgcgatgctcgaagggcaggatccgcagaggccaacagcgatccaggcctcacgctaggcgcacgcccggctgcagggaggcaggtgggtgggggtgctgagttcgctgtcagggagcgggttaggaggaggagggagggagggaggcgggcgggaaagaccaccaggacctcagagccccagagggctgccgggggctagaaccctcagagctaaacccaccagagggcggacctcagagccgcggagggctgccagggtggaccgagctaaagcaccacagggggtgggcagactggagggcatggagcagtctgtgaagggcaggaagtcacggaggagatgctgcgatcggagggttgggagggagctgcgattcgggttcgggcctccagggacacttcgtagagaaccacggcaggaagcggtagaagcagcagggtgcgcctggcgcggagctgtccggtcagtgcagaagagcatcgcccctttattcagcgcctcagccagccagccaggattcattgagcgccttctgtttgccggccgtggggtgtgtccgtgacagtgaggaagggcaagctgggagtggagacgtggcgtggcctccggaggacgggggtctctcagagactgggggaagcggtggcttggagccccgcaccctggccggcctccggaggttgcgggagcggccgtggccgggagggtgagttgcggagggagaggcatcgtccttcagaagagcaggagccggggagccggagggggccagcgcgggggatgggggcggtgctgagggggggccctgcctcccgggagggtccgaacccgaggaggtggagtcacggccaccgagcattcagaggcaacgcaggctgcaggttccccccgctctggtgggctccaactcgagatgcctcgcccagggcacccggcgcggggttgctcctgtgcaccagccattcccaagctcacacaccggaaccttgcaaggcagcggcaccgggcgaggctctgggcgtctcacgtgtctttggcagctgtaggcgctgtgtttgtagctcagtgttgctctccgagaaactaaaagaccttcagtgaccacgctgcctcctcgaggcccgcaccccctctgggtaggggggctggggagcgcctgtggcacctgatgctgtgcagagtatcagtcaggcaggcgcggctctagtccaaggcgcctaggcttcctcatctcctgaaaggaatgtatcacacacacacacagacacacacacacacacacacagacacacacacaccagtgaagaggccctgcgtctagtcccagtcctgactttacaagctcaggtagtgaggcctgttagggactgaatgttatccccgacagagatgtgctggcagtcctaacccctagcagtccagagggtgaccttgcttggagacggatggttgcagatgcgatgggttaagatgcggtcccactggagcaggtgggactgacacaggaggtaaggtgatggtctggacacagctgcaccgagaggagacagtgagagcatgcccaggagggtgacgcctgtggaggcagggcagggtgaagtgatgcgtgccagggtgaggcaagggtttccagccgctaccagaggctgcgagaaaggcccagcagagattgtcccgggagccctcaggaggagcgcactctccaacactggaggccgcaagaggcagggaggttccgctccgtggatatgagagggaccagggccctgcccaccttgatcgggacttcccgactccggctctgtcagtgcgtttctatcgtgctgtaccctccagtacttagttaagcggccctagcaagtaaatccagtgcctttgacagtccaggggttgaaaacagttacacttggtctgcggggttagatctcagcgcccttgcttaatgctctttctactcatttcacatcagcatctcatatttaatttttaacaaaagtattcttttaagtttctttattcaccttgaacaaagctttcattctctttgaaagttagaaaagtataatacaaccacttaacaaattctaggtaaatcttagaaccaacttgttctttctgaggcctcagagatggagcccagcctctgtgtttaggtaggctggccctcacgtcaccatttccttatcgcagaccctgccctgatgctattaagtagaagtaaaatttcacattggaaaaaaaaagcaatatgaatatcacctgcagagattttaaaatttaacctttgaaatgatgtcagatggctgttcttcaaacaaaacttgtagaattattatagatagatttttccaaatattttaatcatttttactttcttacgtgctataaaaagcgccttgtggattgttggctgaattatgtggattaagattacatgcaggtgtaaaggtgaggaataaggaaatgtaatcatgaatcattactcctgtaatagtttaaaacagccctgctctcatcactggagagggaaatggcagcccactccagtgttcttgcctggagaatcccagggacgggggagcctggtgggctgccgtctgtggggtcgcacagagtcggacacgactgaagcaacttagcagcagcagctctcatcacactttttttttttttaatttttactgacagttcatactgtaagtcactcatgcggtcctctccttctcctggcctcacctccctagatcttgcttctcttttcacacctgggacaaagaagcctttccatcaaccctcctgggactatcccggccccctctgacctcccgcttttgcggtcccgtgaggtttcaatcagggccgctcagtagcacttccactgtcctgttccttcctgtgcgcatgcctgggccactcgggagagacggcattcacggcgcggggaaagcccgtcttctcagcagctcctcggaaccaaggccgatgtcacggctctcgcctgccccttgaggcctctgcctctgcctcggctcagtcagtgccgtcggtggccgccacgggagggcgcgctcgagtctggggtgggggcggggatccctgtgctgccattgctaagaggacccgtgccgggagctctttccagcttggcttttttaaaggaagcattgtctacttttaaattaaattctaaaattttctgcatcttttatttatttaaattttatttttactagtgtcaaaggaaaacattttctttaatttataaagtaacataccttttatttgttctgtaaatggtattaatagttgaaacactataatcaaatccatttagcagtaaacttcctaaccagaaagtatctcacacatgtttattgtctcttttaattaactctctgcctgaacactttgtaaatggaaaagtttcctcttggcagtggagtccactccctgccttgatttcagccagcactgtaatttttctgtagccatctcctgtcatttctttcccagtcatttccagcctggagtgacggttatgtcctcttcgcggtttaaaacattgcttctttttatttcattttaggtctccccttcctcctcagccattacctgtctatctgccggtctgtccatctgtcctaccctagaatttctgtttctctgttttctcgttaaaagcatgttcaacattatactgatgtcaaaatgcactttatttcaaccacaaattgaatatattttgtcttttctggaaaagcttgtaaagcttttcattggaagccttcgggaactagaagtaaagactctcccacgtcacagtgttgtgcctcagagtttgtaccaaagcacaaattggggtcttatgtttgaagggatgttgaagcagctcctgacagccagctctcttccagctcagacagtaaatattgaccatctcagatgtagatatcaatgtaccctgtggattataaatgtatcatttgtattactttatgttttataagagtttttaaatctgtatttcattaacataggttgatataccagaataacatattgtcttgttttttatttacattttttaataaaacagactttattttttagaggctttttcagcctgctgcaaaattgagtggaaagtacagcgagcgtcccatacacactcaccctccggcccacagagcccactgtgtggcccgcatccctcaccagagcacacatcaccaacgcccaaacgctggtctttaccctcaggcccttctcgggctggattttcagtgggtgtggccaccactgtagcaggatgcagagtacttccctgccctgaaggccctccctgctccacaggttcagccccgtctctcttctaagccaggaccccactggggaggtggagaggccaggggtggaagagtactgggcgctcagtccctgggggaaagggtctccgtggtttcctcccctgcgcccagcaggaggtcctggcagaggcatctgcagaggcccactgcccagcgcctccgctgcggagacccagcggaagtgcgcggaaggccagcaccagagcgttggcctgggacggcgaccgcagcgcctcagggagtccaggtcaccggctcggccccaggccgctgtggggagggcagtttgcccaggaggcctgtcagcagaagcctttgcttttaggcttcttcagagaaaaagaaccagtagaagatatatatataagagagagagagagataagaggagactccttacaggagtcagcggacacagttatagaggcctggaagccccacaatctgccacctgcgagctgggaaccaggaaagccagtggtataattcagcccaatctgaaggcctgagaagcaggcggctggtgatgtacgtgccaggattccaaggcctgagatcccggagctccagtatctcgggcaggagaaacggacctcccagctccaggagagaaggagcccgccttctttgcctgtcgtcccatcaggcttcctgcacacaggatgacgccccctccctgctgacgctggatcttctcactcggtccgctgagtccaggactcttctctcccagccgcacactcaagggcacacctggaaataacgttttaccggctgtctgggcatgctttaggccagtcaagttggaaacacaaagttaactgtcctgcccttctccttggctgtcttccagaatggctatgccactttgcatccccaccagcaacgcaggagaatcttgttctgcgtcaatcccagcatcggtggcgtcagtgttttggatttggggcattctcctgtgtcacactgtctttttaatgtttactttttgcctcagaaccatctatacagctctaggaacagagatatgaagggagaattaatttcctagtcaaattctattccatattcaaaattaatagttgataccccattctggccttctatgaaactaataccttccacgtacttactcctgttccacagttttctcttgccctagaaagcaacgtgacgatggattagggcaccttttatgggcgaagccagcagaattgcaggcatcgctggactcttacccagaactgctcaagcttccgtgtccctgtgttgctaccaaaggagaatgtacacagtcctgcagggtgacgggggccgtgctcgctggcacagggagaggaaggtggtgatccctgcctcccagctgcttagttccccgtttctccgtgcaggtgcctccccacctagattcttcttttccttcagttcgcttgcccaggtgctcagtagaagtgtcattaaaatgacaagggtatcggacatgagatgttatattaagatcctgcatttgccttctttgctcctgagaccctattgaaatagcataaacccataggatgcagagaattaggaagaaaattatggcggttttggaagcagggaaacagatgggtgagttataactgacttagcatgtccaggaaagtgaaattcaaaattgatcatggagaaagccaggaaataacccgtaaaatttccaaaagtgtggaaattggcagtgctaggtacttctggaagttggtaggaggagggaaagagttaagactgaaaaatgggaactggttgtgcaaatctccagccttcaggatttgccctctgtggacagtgtagtgaaggaggtctgagccagggccccggggaacttcagtgaccttgaaccgctggccttctttctcaggacattgaagccagtttgtctccctctaggaagagtttgggagaatgttctctgaaggaatctggttagcacaaaagaagaggctcagggatggccagagtgaccttggtcaaccctcagcattcacagacccaccaacccatgcacacacagctggcttcaagacacctttatactttcccactcctataggggagcagggagccccaaacaccacgcatttgaggagagcatcaaaatgaaagcagagatctaaaaaacacaggcaggaaaagaccaatttggaggccacagagcctttgcggcggggagaacacttctcaaagatctaggaaatacataattcaaaggaaaattaattaaaaattaaaatatcataaaaataggtgtctggaatataaaagtggaaaagtgtctcagaaagaagcacaggaaacagaaaataaagaaaattaagaggaccaggccaagagatccaacatctagctaaggtgatttcttaaaaaaaaaaaaaaaaaaaaaaaggatggaataacaaactcaaaatgaagagtagaagggagaaagtcagcaaaaatacaacgagaactttctagttgaacaaaaagaacatgagtttctagattgaaagggcccattacatatgaaaacagatgcaaaccaaggtattaatcatcagtttacagagcaagatgttggggagaagagaacacagatctgagaagggattaggaattgaaagggtttgaggttttccagctggaaatcgagaaactctaaagcagtggtaccaatatcctgagggaagaatattcccaacctagagaattctacctaaccagactgttaactaaagtccgaatctttcaaacagaggttttaaaaaattcatctcgggagcatagagcttttggagggatgtgctccagcaaactgagggtgtggagcaagaaagacgtggctcagggctcagggctctgggagcagggacactggacaggcaggaggcgaagggtgtcctcagaggggcagaccggggcctcgcgagcagcctcctcaggagaaaagccagactgccaggacaggggaggcgtatgtgactgcggcagcactgagttcatcttaagtgtgtccgtgactgtataccgtcggtcacaagtgacgtccggccgctgggagcagtgagaaccctatagcaaagtgaagggccaagccccccgcgaagggcacgcccgtgcagcttcagctgcttgttgccacgcgggaaggctagaccagggttaccagctcctaagatttttatgaaatccacattttcctgaggagcattctcattttgaaataccaggaactgatcaaaaaaattttaaatactgcaagttaaacagttctccagctggatttagctccaagctgccagactgcagcctctttcattctagaagtttctgtcatttgcatcacagtgagtttgtgaggacagaagcctccagactttccaacttgttgactagcacaaccgacagactccctagagtacggtgactgtccgcctcagacatggcggctgcctgattctgtgtccacagggatggagaggcctcacacattctgctacccagcgtttatccagcagcccgggcttccctggtggctcagacagtaaggaatccgcctgtggtgcgggagaccagggatcgatccctgggtctggaagatgctctggagaagggcatggcaacccactccagtaccacggacagaggagcctggctgcagtccatgggatcgcaaagtgtcggacatgactgactctgttcagttcagtcgctgaatcgtgtccaactctttgcgaccccatggactgcagcacaccaggcttccctgtccatcaccaactgccggagtttactcagactcacatccatcgagttggtgatgccatccaaccatctcaccctctgtcatccccttttcctcccgccttcaatctttcccagcatcagggtcttttccaatgagtcagttcttcccatcaggtggccaaagtattggagtttcagcttcagcattagtccttccaatgaacactcaggactgatctccttcagaatggactggttggatctccttgcagtccaagggactctcaagagtcttctccaacaccacagttcaaaagcatcaattcttcagcactaagctttctttatagtccaactctcacatccatacatgaccacaggaaaaaccatagccttgactagacagactgagtgattaagcacacagatatatacataacaaagcaaacgtaaaggcaggcagttataaactacaggaaagaaaagcggctatagaagaaagaagagtaattacaatatactataaaaatgaaaacaaaaaattgttctaaccaaaaacttagatataacttcatgagggtgagatgagtaatgtgggtatgggtggaggatttagtttcagggctggggtgtagttgcacatggcaagttgccaggcacattatttgtgcttatgacttaaaaaaaattagaaatagtagtttttagcccatcttgttaccttgggaaggtatatctaaatatgaaatcaaataatttgaatatctttcacttcaaaatttttcagttataagtacagttaacttcgacttatatgtaagttaacggtccccattatttttttgtttgttactatggagaaactctttaaaccagctcccatagaaccattccagaatagttgtaggccatttaaaggcagaggcagccaagtcagttctgcttcaggtgaaaattaaaagtgaaagttgctcaattgtgtctgactttttgagaccccatggactgactatacagtccatggaattctccatgccaggatactggagtgggtagcctttcccttctcttggggatcttcccaagccaaggttcaaacccaggtctctctcatcgcaggcaggttttttaccagctgagccacaagggaagcccgagaatactggagcgggtagcctatcccttttccaggggatcttctcaacccaggaattgaaccggggtctcctgcattgcaggcgaattctttaccagctgagccaccagggtgaaggaagtcctgtttgtttagcaacagataagccaggtggggaagcacacgacctcacatccctgccattctgttggaagccctgcaggtagggtaagcactgtttataaagagagggatacaggtttagtgaagttaggctgcttgcctagattcacacacagtaaatgaccagccaccattctgatgtagctctaatctagatcatccaatttcagattccataggttttcctagataccactcacctttgtcttagcactctgtaaggaagcgcttcagtgtgtggcttcgggcctttttcttaaagcatgtgcatccttgcgtgcatgtgcaaacatttagagaacgttagcacctgtccttccgaaactgtttcaaaaacctgcagaagagggaatgctcccaagctcactctatgagaccaccctcaccttgacaccagaaccagagaaaggtctcaccaaaaactacaagccagtatcactgatgaacacagaggcaagagtgtgcaacagagccccggcagaccaatctaacagtgagttagaaggaccgtgccccatgatcaaaagggatttatcccagggatacaaggattttccaatatctgaaaatcagtccatgcaatatataccacatccatgaattgaagaataaaaagcatgtgatcatctcagtaaagcgcatacgtccttggctgcgatcacaggtacgtagcaaagcttaatctttctttctttttcattctttggcttgtgtcattgtcctgctctggctgaattaaccctggagaaggaacactgtggtggatgagtttttcaggttaagaaaaagtttactataaagatcaaaactaaattttcatcctatcagatttctactattcatgctaaaagcttgcatttttctcttttacatatgctaaattggcttcagttattcaacacttctggcacataatcacaaacgaaaaatgctctggaaatacaagttttcattagtaaattggagatgtcattatctgaaagcaggggccaagacggaggggaaacttatctctgcccatttgggttttactctgggattcttttaacaaaagttaacagacagacaagaaagttgattaacgcatatagctcacatgtatacaggagatacccaggggataatgagcgaccctcaaagagatggctttggatttcaggattaaataccaatttaatagagacgggagaggggagtgtagccctcttaggggagagtaaatgaattttaggacagatgaagggaccctgagaaaaataaatggaaggtatctttgtgacaaagtttgtctggaggcacttgtgacagctgagttccttttcgagcatttatggcagttagtggtaagaggagttcagagaaagcttcttcctgcacttgctgattccaactgcctacagctcaaaataatcaatgtaccagagtggcctactgtggggtggcacgtcctgaactacctacagccatacttcagggtagcatgttctgccacctttcagagttcagactcactctccaccatgtccctagtgctgctgcccgggccgggagttagtaactgctgaggacctgaggaagcgttggttacattcagtgatggatgggtgggtggatggatgggaggaatgggaggaagagccttagtgccctcatttgttatgcaagaagaacgttaatacgttatttagcacccttattttataaagtgtatttgtatttgtaaaacatattgtataacttctcatagtttcaaaagttttctcaagttgtaataacatacgactgttgccctggttcctccaaacgagtgcccgtgtcaagatgctttacagactgggtcatgctgatattgcaagctatttacacttcctgtgggcttccctggtagcccagctggtaaagaatctgcctgcaatgcaggagaccccaatttgattcctgggttgggaagatcccatggaaaaaggatagactacccaggattctaaaggatagactccagtattcctgggcttctctggtggctcagatggtaaagaatccgcctgccatgcgggagacctgggttcgatccctgggttggaaagatcctctagagaagggaaaggctacccactctagtgtttttgcctggagaatcccgtgaagagaggagcctggtgggctgcagaccaccgggtcgcaaagagttggacatgactgagcgacgaagcacagcaccgcacacaagagtactaatgtcaggtgacttttctgttttcagtgcttatttgcatcggttgtcatttgattttcaaaacaatggcctttcaaaataaaaccctgactcttccactagacttttgaattgcaaatcttggttcagcaccaaatcaccgtgtgatcgagacaggtgatttaacctctccaaggatcagttccctcatctgtagacagagataataactgtacccttgtcgttagattgccgtgggaatcacatacaggtgaggtttttggactagagcctaatgaagaaggcatcagcaggccactcttgccttagaggtgatggcagtcacagctccctgcgttaggcatcggccctgctgtgctttcgctttcttcaaggggggacggcatttttttcctctctgcttcccctcccaacatagggccagtcatggatgaggtactcaacagatgactgttggaatgagtgaggtaggcaggtaaatttcttttaaatcagaaagttgttctctaaatgactaaacttgagctcagagaggttgctcgcagcaacttttgagcagctgctataaatcagtcgtttagattatgtcatttactctccaggcagtgttaccggaggtcccaggaggagagccccctctttgaatcctgagcccagaaccatttccattaaactctcctgcctgtctcacaaaatacacaagaattcttctagggtcagtgactaatatataatcattatagcatttgggaaaataatttaatatgagttatgaaacgaatcaattatccaagttttatttgtttgatcacaaaaaaaactatacgtgaaaatgttatactattctaaatatcctaggtttttgaattctaagtatgaatatgataaaatgaacaactaaggaaagaatagtttgaacagatacagaaagggtaggataagtgagtactttacaaatgaaagtagatgtatgaaattacaagctgtcaggtcagcagtggagatgaagatgataaagtggttcctcccatatattataattattcattttgcccggccctgtctcctttctccgtaatgctcatggagcgggggaggggtgggaagctgtctcaaggaatgatgtttcccacagaagggagaaagggagtctaggaaccaaggctatttctgatcataaaacatcgttctgtgacttgtattgtttctggtgaattacagttgttttcctgtggaatatttttcaactaaccattctgattaataaaaaggattcagttgcaaccacaggaagttgcagctgtaaagtttgttcacagtcctgctgcggaggccgtcagcctggctcccgaaaccagcggtgacagcagtggcagatgggcggccaaggaatggagcggttcacacagaccagccggaaaaggctgcttgataacgcggccatagttaggctggtttgggggaaaagcctgaatgttggtctaaggaagagaggcttccttctccgtgatgattttgacacttcctccaggaaaatgctgcatagatatctttgctaaatccctcgttacctttagaaaaataatttgaagaaattatagtctctttaattttgaactgtgtaatatttatatatacagaaaataaatgaaacatataagttgcgaagtataataatcatggtaaataatattttatgggaattttaaactggtcctttcccattcataagacttttgctcctatttccaagcagcaaagtagagacatttaaatacagccatataaatggcaggaagcgttcgtgctcctcgtttatgttgcagacacacacacacatctcggctccttcagtccagcgccgccttgaggctggggcccgtgcgctggatcgtgcgcgcagcccagtgtgcggcttcggaggccgcccggcaaggagcccttctcccagcttccctttatccagatcagctgagttactgatttaccttctttgaacctaagttgttattttgtttctcttactggtccagatacttgaaacaggattgcctctcaattactttttcccttctatttagtgatctccagtaactaccagacctgtctcggccttctgatgcattacccactcatcggggacgttcactcactgattcttaaggctctgttccttcgtgacccaaaggtaagcttcccaagtgggacgtgcacagtgttaaatgggatgaaaaattggcatctcctcatgactctaaggattcgtaatgtaaaatttgcctaatggcagatgaatcacctgctgaaaatttgcctaagagtcgtaggccaaaactcccatgcctgatgggctagcagctcagcgggcaaacagaggacactggctgagaggtgggagcgtgctctgttgtcactcagaagggcctcctgcccgcctgctcccgtgggagcccaggacgtggctgagtgcccgcgtctgctgggaaccgtacttggtgaccatcagcttcctgtacgggtccaaaactgacccaggtagagccttgaggaccacatgaagaccaagacattagagctctaaaaaaaacccctgttttctaagagtttataatgtaatgcaatactaagttatttcatattatgaatgtatatttattttgtgggttaagagtaacctaataaagtaaagatctaaagagtatttaatactgacttttctatttgaacttaagtcaccaaaattttctttatactccagagaaaaagtgggttcttttacaactaatgttatatttcttgaaaataagaacattaagtgatctaaaaaaaaaaaaaaacaactgtgaatccttgatgcttcagagccaaagagaaatactggatggagcctgagagaggaagcgtgggacaggaggccgcgggtgccaggcagccggtggtaaccccgcccttggctatctggcagggcccctgcagtcgtactggccgtggtgcacccgtctctgagtcagtctgtgtgtgggcccactgccagggctctgtctgatggatgtggacctccaagtccaacatgatcctgattctgagagatttctgttcttgcctcagttgttgacttcagcctttgagcgtatcttatatttattttttgcatggttttaaatttttttttttcttttttttttttcagaaaaaaaatccattttctcagaaatgcacaatttttatatcatttctcctgcacagaatttcattatgtatcagaaacataatccatcatttctctgatacataaggtagcttatcttttttctggtaaggtttaggattcagactatgaaaaacataaagtcccatattttttatgtgtatgtaggctgtagaagtatatatttttactataaatagccaagattagtgccatatctataaagggagtaaacaatgaagttgctggtcagtgaggtatctgagttttgatctacagacttatggtaaattctgtctgctcagcactggtaattattagagtcgtacagagtgggacaaaaattgctaaaatagctatttgaattattcatttgtgtgatttgtttggtttaattgaaaggagaaatgaatctgttatgtaaaccatccatcttaagtttttcctagctaaatatggttgtccttcctatgaactatttacacttagagttgcagaattctgatactaaattcatcagtgttattagcagaatctgtgattttaggatgcttttgatctcaagaaggtctagagggacttccttttgtggtccagtggataagactgtggcccggtgcagggtgcagggtgttcgggttcagtccctacttaggggactagatccgcagctagggcctggagcagccaaacaaataagtaaatatttaaaaaagaggaaggtagtgtgtgtgtgtgtgtgtgtgtgtgtgttatgtatgtatatacacacatatatatagagagaataatgaaaccagttctacaagcattaaattcttctgtaaggtttaagaggaaaaaaaatagcataaaaagatatctgaaaaacagtattcctcacttttacattcagtaaaaacaatcaaggttaagtgtccaaaagttaggaccttaatccggtatttctgagacataagaagctggatagaaggcaggagtcatgttgaaaaggcttttgagaacaaggtcatggcgtggtgacatctgtaagggaaaataaagacagctgcggcattttaagggggttcagatggccagctcagcgaggcaggagtttagctaagtgtatgtaatgctgacccactgcctttatcagtacgtgtcaaatgataactgacatcactcagcactagtgccgattggaggtctgtctcggtgcgcggtcctgggtctagccaggagcctgagctaggaatccagacactggttcaagtcttgactctcctaccaaacatcctgtcatctggtgagatccacgagtcctgagtcttcgtcttctcttgtgttgaattactttgcctctgataacccacccaagcagagcagcctttgatcataaagaactgacttctaatgatgcaataagattgaagacacaagtggaaaaaaaaaaaaaagtttacatatatgttctaaaactccccaagcagataggtagttcatgtcaattatgaactcatagaggaggccatggacacttcagttcagttcagttcagttcagttcagtcgtgtccaactccttttgaccccatgaattgcagcatgccaggcctccctgtcagagaaggcaatggcaacccactccagtactcttgcctggaaaatcccatggacagaggagcctcatgggctgcagtccatggggttgctaagagtcagacatgactgagcatcttcactttcacttttcagtttcatgcattggagaaggaaatggcaacccactccagtgttcttgcctggagaatcccagggacgggggagcctggtgggctgctgtctatggggtcgcacagagtgggacacgactggagcgatttagcagcagcaggcttccctgtccatcaccaactcccagagtttacccaaactaacgtgcatcgagtcggtgatgccatctcatcctctcgtccccttctcctcttgcccccaatccctcccagcatcagggtctttaccaatgagtcaactctttgcatgaggtggccaaagtattggagtttcagcttcagcatcagtccttccaatgaacacccaggaatgatctgctgggagggaataaagagaggaggaaaagttggtgctagtaccccaccccatcctctgaaaatccagacatcagagtgctttaaatgtttcctgtgtattagcagcaatgaaacactgaaatcagagtgagtatatccacacaggcagatctctgtaaactagtggaaagaggtttgaagcgcaggagtttgctctccatgtcccagcttcacgaggcagttgttcttagcgctgctgacagacacggtaagacaggaataaacacgcagctccaggcctccctggttccttgtcagccttcagaggagcgcttcctcctctcactagccctcaggcccagtggaggctgctcagctgaggacagactgtagtagggctcgagacactgggctgttacttgttttccatcagatgtaggctttgctgggaaactatgtctcatcctggcagactgagatgatgggcctggaaactgtaaccacaggctcaactcctccatgtctccaagccctttgccatgcttggtttggtcctcactgcaagctccgagtcgggcagagcgggttatctctcctcttgctttttcagtgcagagggattaaggtcatgtggctttccccaggccaagctgcctgcaagcgtgcaaaccaactagagcggttccaggccctgcttccgctcaccccctcctgagagtccgagcatctgctctcccttctccaggaagccgttccaggctcagataagcaggtgttttccctttgagtgccctcagcaccttagtttagtgatttgcttaatcgctgaatcataggttagcgatttgcttgtgtcttttatcagatatctctcctcatgatcctctcatttgatagctttagccttggtcctgcagtgttgctcttaagaaaacaatggtaaattgaatgctgactaatctgggtggatctcactcacctcacctgttttcacctcccttcaccatatccgcgttccacagaagccgtggtcagtggtagatttgtccgctgccatctttatcaagacagtgaagagaccctagagtttgaaggtaaagggcatccagttccttagtttgctatcagacagaattatttgaaaacctgttactcccctcaaataccatggaacaaagcagactcaacatcaatccagtcagtatgcttcacttagactgtgagaatcccagaactgcaaagaaccgagagagtctgacgcacctcctcctcctgtgtgagcaaactgaggatgagagtggagctgagagtgtgcgcaaggccgcgccgcttgtcagcagcagatcgaggggcagaacccaggtctttcagcctccttccagcctgagagatgtacctggtattagttttaaaaatggtagagtcttagctactgatacttctcgtatagattcttttatttatagtagtaggtatctatctgcccctgtagtaagtgaaacggacgtgtttgtaagtgacccaggaacgacttgcagtgttgttaagtgtgtgaagagactgggtatcagtgtctgcagagccctctcctctgttcaccgtgcagtgtggtttctatacttgctcttcagaccacactctggatgcttggtttcctgtcttttgttatgttagaatcactgagcagatttccaaaagcaatccactaaatgaagtagggggatggaaggagggcagtctgaaaaatatgaagggattaaaaaacattgttctaactagttgttcaaattccaaaaaaatttaaaaacccaattagaaacaaaagtcatagagaatgtgaacatattgtgttccttaaataaccagatgttctttccttcctgaaggcagtaagggctcggaataaaaggtttaaaactattgttttaagttaactgtgaattttgcaaatctgcttttacccttcagcaaataaaattctaatatggaaacataagcaaagtgattttcatttttcggtcctctcttacttgtgtcgcatgttgagtgctaaccttatcacaaagacttattgcaaatgaaatacagtgcattgattaacactgaagatgattcagtaagagtttgacagccaccgattgaagactagaatattgtccaaaaattatttccggtaagtttgcaagcatctcttttagcagtgactgttactgtttatgggagaaaactgctagaaataaggtaacttaattctgtagtcattcttgtacacaaaaacatcctataaaacatagtgtacaatgttcttgcgcttggccagttctgatttggcttttgtttagatttatgttagactttgcttttttaaattataaaatccaaatactcagattttatgccagtaatagatttttatttttttaattccaaaaccctcactgtacatgcagcttttttttttactgtcaaatgtcattttactaaaatgtcatatatcagaattgaaatgataagtggattcaagtctggtgatgatgatagaagatgcttcactctggcaaagccattataacgtcttcttctctgaacgaggaaggacctaaaatcacacacactgactctttgagagtgcacattgtccatttatctacttttcctgatgttcttgttgaaggttctgttcagatttcccaggatgtgtgattttgttatagaaagaatgtgttacttctggtttcgtcatcctttttcccctctaagagctgaagcagttccctgaaatcgttcttgaagagtcatatttctgtgtgttttctctcttagtgaccaaaagcaggtgttttttcctttgtatctatacatgactctatattgttctttttatcactagattttaaccagctgaatgattattatagctaatatttaggcattggtgatgcctcagttatattttcatattcaatcagaaatagagactttttgagatagactaaccttaaaaacctcaagttttacttctgagtaaatagtggttttcaaaaatctataaaagagtagtcaaaatatctttattgaaccagtatttgaagtttgttatttattatgttcagacatttcataaagcagaattacgtgttcctcaaaacttcttaagggtttcctagggcctttaattttggactcgttctataaagtgtttcgagtttgttactcaggagatctttactgtgcgttaccctgcactggcactgcttagctgctggtgatgttaaaggtggaccgaaaaatggcccttaccataataaacaagcaaagagaaagtactcagttcgtcacgtgttacaaaaggtgcggataggatgtcatccttaaagtgagaagggaggaagaatctgatctcaatgaagacctccatgggttggtctaaaggctctctctcaggaggcaccatttcaggtgagaactgttggaggagaaggaactaggcagccacagagtcgggaaaggagcctccaaggaagggatagcaaacacacactccaaaggcggaaggagcttgggctgttagtggagccagcggaccagcaagctgtcggggccctgcctgagcccggatgggcctgcgaggctgcgtgaggtcgcagcttgaagctccagaaagatgctggattccgaatggctctgcctgatgggtaagacatcttatcataaacgactcttgctctcaggcagaagtgccaaaaactcttcttaaaggagctcctcgtaccttggtaaaacacgttcatttattcagacctccaggaaaacacacccatttattcaaacctctagactgaaaaggcaaaatgataggaaaccaaaagaggaactccccaggtcagtaggtgcccaatatgctactggaaatcagtggagaaataactccagaaagaatgaagggatggagccaaaacaaaaacaatacccagttgtggatgtgactggtgatagaatcaaggtccagtgctgtaaagagcaatattgcataggaacctggaatgttaggtccatgaatcaaggcaaattggaagtagtcaaactggacatggcaagagtaaacgtcaacattctaggaatccgcaaactaaaatggactggaatgggtgaatttaactcagatgaccattatatctactactgtgggcaggaatccctcagaagaaatggaatagccatcatggtcaacaaaagagtctgaaatacagtacttggatgcaatctcaaaaccaacagaatgatctctgatcatttccaaggcaaaccattcaatatcacagtaatccaagtctatgccccaaccagtaatgctgaagaagctgaagttgaacggttctatgaagatgtacaagacctcttagaactaacaccccaaaaagatggccttttcattataggtgactggaatgcaaaagtaggaagtcaagaaacacctggggtaacaggcaaatttgatcttggaatacaggatgaagcagggcaaaggctaataaagttttgcccagagaacgcactggtcatagcaaataccctcttccaacaacacaagagaagactctacacatggacatcaccagatagtcaacaccgaaatcagattgattatattctttgcaaccaaagatggagaagctctatacagacagcaaaaacaagaccaggagctgaccgtggctcagatcatgaactcctttatgccaaattcagacttaaattgaagacagtagggaaaaccactacaccattcaggtatgacctaaataaaattccttatgattatacagtggaaatgagaaagatttaagggactagatctgatagatagagtgcctgatgaactatggactaagattcatgacattgtacaggagacagggatcaagaccatccccatggaaaagaaatgcaaaaaagcaaaatggctgtctggggaggccttacaaatagctgtgaaaagaagagaagtgaaaagcaaaggagaaaaggaaagataagcatctgaatgcagagttccaaagaatagcaaggagagataagaaagccttcctcagcgatcaatgcaaagaaatagaggaaaacaacagaatggggaagactggagatctcttcaagaaaattagagacagcacgggaacatttcatgcaaagatgggctcgataaaggacagaaatggtctggacctaacagaagcagaagatataaagaagaggtggcaagtatagacagaagaactgtacaaaaaagatcttcatgacccagataatcatgatgtgatcattcacctagagccagacatcctggaatgaaaagtcaagtgggccttagaaagcatcactatgaacaaagctagtggaggtgattaaattccagttgagctatttcaaatcctggaagatgatgctgtgaaagtgctgcattcaatatgccagcaagtttagaaaactcagcagtggccacaggactggaaaaggtcagttttcattccaatcccaaagaaaggcaatgccaaagattgctcaaactaccgcacaattgtactcatctcacatgctagtaaagtaatgctcaaaattctccaagccaggcttcagcaatacgtgaaccgtgaacttccagatgttcaagctggttttagaaaaggcagaggaaccagagatcaaattgccaacatccgctggatcatggaaaaagcaagagagttccagaaaaacatctatttctgctttattgactatgccaaagcctttgactgtgtggatctcaataaactttggaaaattctgaaagagatgggaatatcagaccacctgacctgcctcttgagaaacctatgtgcagtcaggaagcaacagttagaactggacatggaacaacagactggttccaaataggaaaaggagtgcgtcaaggctgtatattgtcaccctgcttatttaacttctatgcagagtacatcatgagaaacgctgggctggaggaagcacaagctggaatcaagattgctgggagaaatatcaataacctcagatatgcagatgacatcacccttatggcagaaagtgaagaggagctaaaaagcctcttgatgaaagtgaaagaggagagtgaaaaagttggcttaaagctcaacattcagaaaacaaagatcatggcatctggtcccatcacttcatgggaaatagatggggaaacagtggaaacagtgtcagactttattttgggggggctccaaaatcactgcagatggtgactgcagccatgaaattaaaagacacttactccttggaaggaaagttatgaccaacctagatagcatgttaaaaagcagagacattacttcgtcaacaaaggtccatctagtcaaggctatggtttttccagtggtcatgtatggatgtgagagttggattgtgaagaaagctgagcgctgaagaattgatgcttttgaactgcagtgttggagaagactcttgagagtcccttggactgcaaggagatccaaccagtccattctaaaggagatcagccctgggtgctctttggaaggactgatgctaaaggtgaaactccaatactttggccacttcatgggaagagttgattcattggaaaagactctgatgctgggagggattgggggcaggacgaaaaggggacgacagaggatgagatggctggatggcatcatcgagtcaatggacacgagtttgagtgaactccgggagttggtgatggacagggcggcctggcaagctgcaattcatggggtcacaaagagtcagacaggactgagcaactgaactgaactgaactagaatgtcacatgagtctgatcagtagattccagtttgatttaagaagactgaagccagcactgtgaacgcttttggtcatacacatattattgttatctcttaaaaaactgccttgactgccttctgtatgccaccagtctcaggcagttttgcttccatttacgtcagcattgtgctcaccaaatagtgttaagggaactagacccatctttcttacctaccaaacaagagctctgcaaggtcagggaccagatctccaatagcattaatcctgggtcagcctctgaaggaatctcaaaatccaggtttcgcctctgtcacagtctgctgcctttatgggcaggtcacccttttcttggacaaagaggctgggtcacataattttaaaggacatttttgatatgttttagtaggatgcatttcacctcagcagatcctccctctttaaaaaaaaaaaaagaaactatctgtatagaggatgagtgttggtccatgtgattgggacacagtccattacaggtgtgaacaactgatttgaaagatcaaatgaatgagcatattgtagaaaaaacagctgattcggtcttacagagtcaaaaagatcttccatatgggctttgaacaattttcttgggacattattccatcttaagaaaacagtgtaaacagagttcctgagaagggctgaagcaagtagccaggccacgcctggcagttctctagcgacagtcattcgtggacccctcagggacctcccgtcaacacatatatattagcagacactaattttttttattaaactataaatgatttgcagtatattgttagtatcaggtgtatggcccagggacttggttgtacatttatatgtacatatatattcctttccagattcctttcctttataggtgattataaaatattgattatagttctctgtgctatgctcagtattggttatctattttatacttagtactgaacatgttaatcccaacctcctaatttaaccctctgcacaattgcactcatctcagattctagcaaagtaatattcaaacttctccaagttaggcttcaacagtatgtgaaccgagaacttccagatgttcaagctggattgagaaaaggcagaggaaccagaaatcaaattgccagcatccgttggatcatagaaaaagcaagagagttccagaaaaacagctacttctgcttcattgactatatataaacctttgactgtggatcgcaacaaactgtagaaaattcttaaagaaatgacaataccagaccgccttacctgccttctgagaaatctgtatgcaggtcaagaagcaacagttagaaccagatatggaacaatggattggttctaaattgagaaaggaacatgtcaaggctgtatattgtcactctgcttatttaacttctatgcagaatacatcatgagaaaccctgggctggaagaagcacaagctggaattgattgccaggagaagtatcagtaaccttagatatgcagatgacaccacccttatggcagaaagtgaagaactgaagagcctcttgatgagagtgaaaaagctggcttaaagctcaacattcaaaaaacgaagatcatggcatccagtcttatcacttcatggcaaatagatggggaaaacagtgactgactttgtatttttgggctccagaatcactgcagatggtgactgcagcttggaagaaaagctgtgacaaacctagacatattaagcagagccattactttgctgactaagatccgtctactcaaggctacggtttctccagtggtcatgtatggatgtgagagttggtctataaagaaagctgagtgccgaagaattgatgcttttgaactgtggtgttggagaagactcttgcgagtcccttggactgcaacagatccaaccagtccatcctaaaggagaccagtcctgaatattcactggaaggacagatggctgaagctaaaactccaatactttggccacttgatgtgaagagctgacccacttgaaaagaccctgatgctgggaaagattgaaggcaggagaagtgggtgacagaggatgagatggttggatggcatcaccgactcgatggacgtgagtttgagcaacctctgggagttggtgatggacaggaggcctggcgtgctgcagtccatggggtcacagagagttggacacgactgagcgtctgaactgaactgaacaactcctttttgctttccccttcggtaaccttaggtttattttctttgtctgtgagtctctgctttggaagtgtgttcatgtgtataagttttagattccacatatcagcaataccgtgtttgcctctccgtgtcttgcctcacatagtgtggtcgtccgtaggtccacgcacggtcctgcgaggggcgtgtttccgtcttttcatggctgagtgctattctgtagcgtatgtgttctgcacctgctttatccattcatctttgaacacatctaggttgctcccatgccttgatccttatacagagtgctgctgtggacattggagtctgtgtttctgttcagactccagctttctccgagtgtatgcccaggagtgggactgcaggatcccacgggagctctatttttagttttttaaggaaacttcctgctgttttctctagtggctataccaatttacattcccaccaacagtatggaagagttcctttttctccatactcttctccagagtttgttattttgtagactttctgatgatgcctattcttaccagtgtaaggtgatacctccttgtagttttgatacccatttctctgacatttagcagtgttgagcatcttttcgtgtgcctcttggctctctggatgccttctttggagaaatacctatttagatctgcccgttagttgatcgagttgtttagtcttttgatgttgacctctgtgagctgtttgtatattttgcagattaattccttacaggttgcatggtttgcaagtattttctttcgttctgcagactgtcatttattttgtttgtggttctctttgctgtgcagaagctttcaagttaattaggttccgtttgtttatttctgttcttctttgcattactctaggagatggatccaaaaacctattgctgtagtttccatcaaagagtgttctacctatgttctcctctaggagttttacagtatccagtcttacggtctttagtccgttttgagtttctttgtgtgcattgcgaacatcctaattccacttagttttacaggtagtctagttttccaagtgcctcttattggagagactgtcttttctctattgtctactcttgtctcctttgtcatagattaattgacctaggtttatgggcttatctctggaccttctgtccttttccactaataggtatttgtttttgtgccagcaccatgctgttttgcttactgcagctttagagtatggtcggaatttaaggaacctgattccttcagctccattttctttctcaagattgctttgggtgtttgagggtttttgtttccataacaaattttaaaattttgggttatagttctgtgacaaatgccattggtaatttggttgggattgccttgaatctataggttgcattgggcagtacagtcatttggaaaaggttgattcttacaatccaagcattggtgtatctttccatctgtttctgtcatgtttgacttctttcatcagtgtcttacagtcttctgcctcctgaaggaggtttattccttagtattttattctttttgatgtgttggtaagtgcaattgtttctgtaacctctggttttgatcattccttgttagtgtatagaaatgcaacataattctctgcctgcagcttaaccagattcattgatgagctggtagttttctgatagtgtctttaggattttctctgtacaatattatatcatctgcaaacagtgacagtcttacttcttcttttcccatttggattccttttttttctcttattgctgtggctagcagcaataagagaatctgcagcttccaaaattaggctgaataaaagtggcaaaactggacacccttgcctggctcctgattttagaggaagtgctttcagccacacaccattgagtgtgatgctggccgtcagtttgtcatacatgactttcattatgttgacgtaggttcccactgtgcacaccttggagactttttatcataaatgttgaaatttatcaataactttttccgtatctattaagatcacatatggttcttattcttcagtttgtcagtgctgttaccatgctaattgatttgtagacactgaaaagtccttgcattcctggggtaaatcccgcctaatcatggtgtatcatccttttaatgtactgttaattgaattgctagtattctgttgagaatttttacatctatgttcatcagtggaattggtctgtagttttctttttttatggaatcttcaggcactaattttttaaaatacatcacatgtgtaggatatcctgtttggtagtagtttattaggcattaatttatataatgtttcaacttctgtgctgttatttaacataagtaaatgtttgtgtttaagtaaaaagttgatgtgaaaagtactttttcccagtgatttttgcaagatttattggctaaagtagtggcttgtaacattggctcaaaataagcaacatgtttgtttatatctttaaagtcactcttgaaaagttcagattttttttttattgtgggtggccaaagagacctgtgaaactctgtggtgaagagtgctctgaatgttttagaggagagagtttctttactgaaaccaattatcatggtgatttattttttcttaaataagtaaagaagagactaaaatccgtggtaaattctattctcattaacagtacacgaaacaaaatctataaaccagttctctgctttatagttgctgttttacaagtaaaggcaaaatggtggcttttacagagacatatttattttataaataaatatttataaacctccttaatagctttcaaagctgttaatcctatgcatgtcagcttagaaaggcagtgaggctgcgaatgtacagtgtgaaagggttacagcatatcgcagggaggtgtctgtgccctgccccatgggcaaggggcagtggccgccctgcctcactgctgacctgccctcccacagtcaaagaaagcatgggacgttgtgcagccttaggtcagattctaggtggactggcaagaccgtaactggcctataatctctagaggtcatttccagttctaagtgcagagaacctaactaatcacttatttttcttcttatatacttcagaaggaaaaggtgctactttgagttctttgtcatcctaatgttatagctgaaaaaattgaaagttataaatcacaaattataacaaaaagacacaataaaaatgaaaactgacactagaaaaaaagagcataattctttttaatctaaatagttgtgaccacagtaaatatgccatttactccttaagtatattaatagtaaacatcttattgggcttcccctaatgccccagtggtaaaaaatcctcctcaacgcaggaggtgtgggtttgatccctgggccacgaaaatctcgtgaaggaggaaatggaagcctactccagtagtcttgcctgaaatttctcatggacagaggagcctggcgggctgtagtccaaagggtcacaaagagttggacacaagtgagcacacaggtatcttatagctgatttaaagtgttaaatgtattgattttatagaagtcaatacactcaagtagttaactgcataatcataattgatttactgttctatttaaataatttgaacacaaacccaaaacaaaaccacaaaatatttcatcatggggagcttttccgtttatttttcccagttcaagcacttctgtggctccatcctgggaaatgagttggtttctgtgctgcagcttggtctgagatgctcgcatgacctggagcggcacctccgcccacccgtgccagaaccccctcacgggccccggcggaggcctgggggctgtggggggcccgactgcatttgccctgtgaatgaggctctcacgtgtcctgagtgactgttcctcagtgtctgctgtgatttggaatgctccttaatttccttgggcgtttttccacgttttgaagaggagcctctggttcatttctccccattgtttccttctccaaaatgctacttttataaattcagccagaactgcccagctcccactgtgtaccagtgatatccaaagttccagaattcaccagacgtcttggttgaaactcgtaaggaaggatgaacaggcagtgtggccagtgaaaggtataaaacccacttgcctggttccccgccctcctgtgagtcctcactgagatgcgtgtcccctcagcgagccctgggcccgtcacccgcagaccacctgtgccccctcctcacggcccccgcacccggatcacggcagtcaccagcttctgtcacagtcgataatccacttatctgtcatgtcctctgtaaagatttttctgtcttcctctgacagtacatcacctccatgaaggcagtgcttttagtccgctttatattcttatcaaaatactgacaataataaaggaagggaagaaggagggaagaagggtgactgaggaggaactatgggctccatcacagtgacatttagcaggtgctgactgccgcctgcaggtcaggaagcaacagttagaactggacatggaacaacagactggttccaaataggagaaggagtacatcaaggctgtatattgtcaccctgcttatttaacttctatgcagagtacatcatgagaaacgttggactggaagaaacacaagctggaatcaagattgctgggagaaatatcaataaccttagatatgcagatgacaccacgcttatggcagaaagtgaagaggaactaaaagcctcttgatgaaagtgaaagaggagagtggaaaagttggcttaaagctcaacattcagaaaacgaagatcatggcatccggtcccatcacttcatgggaaatagatggggaaacagtggaaacagtgtcagactttatttgggggtctccaaaatcactgcagatggtgactgcagccatgaaattaagacacttactccttggaagaaaagttatgaccaacctagatagtatattcaaaagcagagacattactttgccgagtaaggtccatctagtcaaggctatggtttttcctgtggtcatgtatggatgtgagagtcggactgtgaagaaggctgagcgccgaagaattgatgcttttgaactgtggtgttggagaagactcttgagaatcccttggacttcaaggagatccaaccagtccattctgaaggagatcaaccctgggatttctttggaagtaaagatgctcaagctgaaactccagtactttgccacctcatgcgaagagttgactcattggaaaagactctgatgctgggagggattgggggcaggaggagaaggggacgacccaggatgagatggctggatggcatcacggattcgatggacgtgagtctgagtgaactccgggagttggtgatgaacagggaggcctggcgtgctgggattcatggggtcacaaagagttggacccgactgagcgactggactgaactacctgcctcctgtgcccggtcctggggatgcggtgagtcagggagacagggcccagaggccgcaggtaacagtgggtcttcacaggcacaaccaggagcctggtgcccaggcagacccctcacaaccggaacgtgaacagtctgccgcagggtccggaagtctctgtaactgttctgagatcacctggtctcagatgatacttgaagaaataaacatgagattgagagaaaagctgctgcccaacctgaaagccaaacacaggctgagaaccagtgctttcagaaatgagtgcttgtgcgtgcagtgcctacgcaggagcgtcagaggatcccgggaggaaaggagcggagcttctgtttattcgcatctttctgcaaaagaaatagaaaccgagctttgcattagcactgtggccttcaggcaggcctggtgtcactggtctcccatcacctgtcgggcctcctgagggggaggccctcctcacaagggcacggactgacccctgcctgcccttcgctgctccttgtacccagttacggggtcatgcagatgacaggttcttaatgccatatttattccagtgttaaaaagatgctggggccatgaacatctattgtgggtttgccccatatcttctgctaataacagttgtccaacataacttctgtttgaaaagcatacttcaaaattgcttacctctaatgtgatgacaggtaactgtcagtattaaggtaccatgcaaatatttttgaataaacaatttgtctcttcaaggtaatgatgacattttaataatgagtgaaaataaagagctttatcaaagaagttcgtggtattggatgaacagtttcaaactgtgtatttggaagtttcatctatttgtgatggtctagccaaaaacaatttaaacgtatcacttagttacatctctcaaactacactaaaaggtatggaaacaggattttctaacttgctttcaaatcttgtaaatgaagagataaactcaggtttgaacctgttttttttaaagagaggaatgtgacatcttccaggtaaatttaaagcagagctgagtggggcttccctgggggctcggtggcaaggaatccgcttgccagtacaggagaccggtttcggtccttgacccgggagggtcccacgtgccctggagctactgagccttgccctggaaccaggagctgcgctgctcaggccgcgcacggcaagagaagccgctgcagcgaggagcctgcgcgccagcagcgggagagcggccccacgtgcctcagccggagggaaggcgcgtgcagcagcggagaccagcacagccagaaataagattaaagaaaaaggagagctgggtgacaactaatgctgggtgttgacttgactgggatgcagagacagctggtcagacacccgttctgtgtcggtgaggttgttcctggaagcgctgagccctggatcgctagaccaggccaagaagattctccccaacagtgcacacaggagcatgcaggcccttggggggccccaggagaagaaaataccgaggaagggcatccttgagccaggacgcccctctcctgccctcacacccgagcacctggttcgtggccctccggcatctgacccaccatcgttcccctccaacctcccgtgactctctccttgcttacgtgtcccccttcttagaccttggcacgtggactgcatcacaccactggtgttcctggttctgaagtctcccagtggtctccccttcttagaccttggggcgtggactgcatcacaccactggtgttcctggttctgaagtctcccagtggtctgtttcagcatatttcacctcataatcacatgagccaataatgaaaccttctcttctatatctgtgtgtaccagttggttctttttctctggagtaccctgactaatacaagctgattaattttaaagaagacagaagttttagtagccaaattttaacaaaacccctggcatcactgatgagtaccaaaataaacaccatactttagcaagggcaccaacaacggccttccttcattcagacccgaatctctttgtgaggtagctttctctggagtgtcaaaaactgttgcaaagcatttaaccaagtcaagaagcgtagtcaatcacattcctaccattgcaaatagatttttaggaagagcaaaaaagctaataaatattctattataaaactaatttaaatatagtgtattttatctcatttaaaaacttttgcatatattttctaatgtacataatagattactgcaagtggtatatgcatatgatttgtaaataaatagtgttacatgtcaggccccctgattttaggtagcaaaagcatcatcaaagttgagagacccctgctctagacaagtgtctccagaaagcagatccagtcaatcctgatgcctggccagttgagagagcaggactggtctgggcacacaggtctgggctcccccacacgtccttgagcagggccgcttggcaggacgcaggcctaccccttgtcctgtgaatgaaggcaccctcctgtgtccctctagttaacctgatgctttgctgaattctggaccgttgaatgccactgacaagcggacctgctccagcttggttctcgtgctttttcttgtaacttggattcgtcatgcactttttctagatgatagctgctgatgaaaaaggacttccattcagttataggaatgctgtgtatcgtgtaatttctttagaggttgttgggacttgggatccagtaattacacctgcatctactcctgaggccgggtgagggtgggatgagatgtccaggccactcacggccccgcgcgtagccaacgcagtgcccacggccccctccactgcctcgcccacctcgcaggtttctgggacggactctcaccattcctacactccccatttccttttcttcctgaggggaacttgtttccttgaatcttcgtttgttcatggtctaaatactgagttggaaaattggtctgttgttaattggtttgccaaatccggcctctaggttcagaaagtattaaacccagtgagatggatggggaaagtatataaaaataataataattactgttctatagtgagactgacctttgttttctttcatcaaccatacatcagcagcggctgctgcccaagtgggggacagtaacgtagggatgaaagtaaaccatcaggagtgcagactcccaggcgagacgccgagggcgcggggcgtgcacacaccggctgttgatgagtgagaaccaaggagcagaatgaagaagtcacggggacagccttccttcttgcgctgctttctgagagtgccgtgtgcacctgccttggtggtcatgctgctttgttgtgggagcgtgttagattacagtgttaccgtcagttaccgtgacaaacgaacccgtgttcccatgctttaacacagtaggtttgtagctttcacacaagtgacaatccactttaggtcaagggtgaggctatctcaggatcacccagttcttggggcgtctgccagctctgctgttttcagctttgaccttccagggttgtccagcacattgacctcccgacagatgagaggactagttgattactgaaccaaatgcttgcctgctcagcacggctgaactaccggcagcaggctgtggtgaagaacacgcagcactcactgcagggcactgagcaaggaggatgggcagcccatgcccagatccccttgatgcttcagaccacgtgatggctttcagggagaggctttaaagacagggtgaggctgggcggcagggtgtagggtcatcttaagcacagttctctgactggcattaaggcgaggtttcaagcagcaccaaccttccggtttcagccagcctagagtctgtgtgcttctggtcagttttccccctggaggagctctgcttcctgtgaaagcaacttaggcatgtgtgccagggttgcatttgcgtctttcagggagctgtaggtcccctgactctgctgttgttgccagttccccaccctaagagctgctctttatgtcttcacattccatcatttactgtttgtgtcagccttttgagactcaaggcaggcctgggagactaaagacctgttgcttccaaggtcaaggacacggatcccttgagcataggacaccactgtatatggtttcagttccacctcttctttgctgctcctcagtcctgagagcaggtttagggaaagaaagggagcacagctttgggtagagaggctaatcgaaaaatcggcagaggaactcagtttcaggggacgtggtctcaagagctttttcccagacgttggcgatcttagctcctttgagagccccttgggtttctcctctgcggtgcttctttaaagcgaaatgaggagagatgagtcgatgctgttgcgtggaacggtaagccctgcatctgaccgtcgtcgagtcataggtggcgttggtagtgatttgattctttctggccttttttggggagcttcccaggtggtactagtggtaaagaacctgcctgccaatgcacatgagatgtaagagacgcaggttccctatccctgggtcgggaagatcccctggaggagggcatggcaacccactccagtactcctacctggagaatcccatggacagaggagcctggcgggctacagtccagggggccacaaagagttggacatgactgaagcaattcagcgccatgcacgacctgttcttgaagtccctcttgtgacagaagtgctgattctccactcccctttctcactacagcagccgaaacagagtacttccgattactgcacttagacgctgtgtgatgcctactcggtttaagctgtctttgtgggaacagcaccaaagtaagaaaatttgcagaaagcagaaaaatgtcaggaatgcttagagttgtttttcatgaactcaggaaagaggtaaaccctttacccttatttttctagccagtatctgaagaaatcctgtcagattttcttataaaggttctaacttaatgtatctgttttacattccactaaagaggacccactgacaagagtgtcagctattaacttgagatccagctacttgatttacttaattggtaacctcttatttaagttctcttgaacatgcttcatttgagtttgagaaactaagtggctaatacatagggaacaatgtttgaaatagcgccgaacagaaaccagaacttcagagtatagttagggcttaaagtaagcattcaaaagcagctgacttccaatcaaacacgggagaagtgatttcattatcacagagatagaacagtttgatggcctaaagagtttcactgaagggtttaatatttgtgtgtgtgtgtatttaaaattacagtcattttataccaaccactgttttttttaaataggaaaacaatagaacatagataatatatctgtatttttcatttcttccttccttttttaaaaaataagatatatgtatgagcttcttgaaaacagaagcactccaaggagcgctgaggaaagcatcggcagaggctcggtgaatgggcccagagctctgggcagtgagccgctagctgtgtttccaaggtatccacctactgactgagtttgtggggaatatatagatgagcaagtttgtgagaatacctgggtgtaagaaggttgaataatgagttgcttttgagcaggttgtggatctccaggaagagactgcagaaggcagctaggaacgtgtcgaggactcaaaggagtgacctggcccaagatagatttaggtatcttggaagccaagtatgaactatagctgacggaatgtgagtgactcaggaatggcgtgttggggggtcagaggagaactggaagggatcaaagggtgtaagggtcgggtcagaggaagccagatggggtagacttggaatgtgggcaagatggagaagcagggtcacgtgcagggtttgaagagcgctctttaactgctgtagcattggtctccagcatgcctcacgggcaccacggtagatttctgcctccatctaagctgcggcgtgctcgctgccgagacttcggtctctggcgcccgtccccacggttagccctccctcacttctccaccccaaccctgtcctctggtgcccactgccctgttctctgcacccctgtttgcttttgtctgttcatttatcttggggttttgctacgctccaggcataagagagatcataagactctgcccttttcccctttaacttacttcactgtgcgtagtgccctcaggggccttctgtgctgtcccaagatttctcctttttttcatggctgagtaatatcccgttgtagatgtgtaccagttgagaagatagaattattaggcaatataattatctacgtgttgatgatcccaaggactggaaatggttagtgacagatgttacagagagaccaactgaaataaaaataaacaaccttgaaagttgaaagctgctgagatgtttaggaggagtattaaaggggaaataaaagaatcctttcagactgaaacagcgacattaagaaaaacaaaacagaagcaaaaagactgtaaatgattgcaaaatttaaaaaggatagtgtggaatctaagggtgaaaatagtcagcaacttgtgttgctggtaacgatggttagattttttcaaatgcatagataatgtgttgtttctcaacctgatccgtaataaagtaatgtgcccagtttttcatttctaattttgagatgtgaaaaattgtgaaatattatttgagaatataaactgattatttaaaagaaacatagataacacttaaagcatggttacctctttacacctggaactgtgattcagttcagttcagtcgctcagtcgtgtccgaatctttgcaaccccatggactgcagcacttcaggcctccctgtccatcatcaactcccgaagttcacccaaacccatgtccatcgagttggcgatgccatccaaccatctcatcctctgttgtccccttctcccgccctcaatctttgctagcatcaggaccttttcaaatgagtcagctcttcgcatcaggtggccaaagtattggagtttcagcttcaatatcagtccttccaatgaacacccaggactgatctttaggatgaactggttggatctccttgcagtccaagggactctcaagagtcttctccaacaccacagttcaaaagcatcagttcttcggtgctcagctttctttatagtccaactctcatatccatacgtaactactggaaaaaccatagccttgactagatggacctttgttggcaaagtaacgtctctgcttttgaatatgctgtataggttggtcataactttccttccaaggagttgctgatgctgccaagtcgcttcagtcgtgtccgactctgtgcgaccccagaaacggcagcccaccaggctcccccgtccctgggattctccaggcaagaacactggagtgggttgccatttccttctccagtgcatgaaagtgaaaagtgaaagggaagtcgctcagtcgtgtccgactcagcaaccccatggactgcagcccaccaagctcctccgtccatgtggttttccaggcaagagtactggagtgggtgccatcaccttctcagtgtcttttaatttcatggctgcagtcaccatctgcagtgattttggagcccagaaaaataaagtctgacactgtttccactgtttccccatctatttgccatgaagtgatgggaccagatgccgtgatcttcgttttctgaatgttgaactttaagccaactttttcactctagtctttcacattcattaagaggctctttagttcctcttcactttctgccataagggtggtgtcatctgcacatctgaggttattgatatttctcctgacaatcttgattccagcttgtgctttatccagtccagcgtttctcatgatgtactctgcatataagttaaataagcagagtgacaatatatagccttgatgtactcctttcccaatttggaaccagtctgtttataaggtttatacgtctgtttataaggttgggtatgctcagttgctcagtcttgactgtttgtgaccccatggattgtagcctgccaagctctgcccggccatctttattccagcttgtgcttcatccagcccagcatttctcatgattatttatccccaaaagaaaactaagggttaattaacagtgttcttcattctttgatgaactcttatgtaaatgacagcagccatgaatatatgtaggcaaaagaggtttgaagatggaaatagatttggttcctgactgtagtcttactatcttcatgaatttggccaaaatacaaaccattctaaccggtctttttacctataaagtggtgctgagcctgttgtgaaagttctgtgaatgtgacatagtgctcgtgaagcgcatggatggtctggcgtcagtaagtgatgactgatggtctgtgtgcttcctcaagaggaagaagcaaggctgaacaggcaggactctatttgagggtctatctaagctgtgggttttctccccctaaatttagtgtttaattgatgctttataaatgagcaagcttattcctgagcctcttagtttccagtttccatttacatagtaagcttcctgaataatttaatgtgtcgttacgtgttggtttcttcctgtttttgtaactccctggctgtctggtggttaggagctggtgcttccactgccagggcctgaggtttgatggctggtcgaggaactgaggccctgtaagctgtgtggtgtggctataaataaataaagaaagaacctttaaaagataaaattatcagttgctttttatgtaggtgtacagatagataacatgagtttgagcaaactctgggagatagtcaaggacagggaagcctggtgtctgcagcccatggggtcacagagtcggacacgactttgtgactgaacaacaacgacaaacaggcaagctgtgaaggttctgggcgtcactgatcattaaacagcgccatgcagaaaaggaagccccaggttatagctgacgagaactcgaagaatgacaaccagttcctcaccgctgcgctgcttctctatgtgaccctccccacaacacattcaggtcgccaagcctccccctcctgtttgctgttccaccgtcagttctgctgggaagtcctccctgatgaagcagaatccccgttgcacacttccctagcaccctgtacttcctcttctaagcactcggcacggacacggtcttacactgatgtatgtgattattccattattccatcctcttgccccttcagggtggacttgaggctgctgtgttcccgttgtcctcccagtaccccacgtagcccctgacacaggaagtatctgcataggaggatccatggattggtgggtgggtggctggctgggtggagccagaagaatgtttatctttccacactgtcttcaccccagctgtgtggtcttccttctactgggattgccgttgctgcccttttcctatgggcaccttcacaaccttcgttctcatccagctgaaatcacacttcttggttataaaatggcatccagattctcagcttcctaatgaaactcctctgaagattcaggcaaacaatatcagaatcacagaaaccaaacaaagcagacaacctcctgcctacaggaggtgagctcggttagcgactgtcactcccagctgatgtgcagtgtattttagggctggattgtggagaccatggtggtctttgatgtcttgctgagaaactgaaactttggcaattgagacttgattcagaactaagggagggaagtaaaaaaaaaaaaaaaaacctcagacctgtatttttcgaaggtgattgaggtgttattatgtgtatcagcaggcacaagattaaagacttgatatagtcaaggcaaaaatcaagacagttctgaaccacagtgagggtcctggtcatggagctgtggggtcttgccacaggtgtcctgggaggcagaatgatataagtcgctcagcccagatgttttatgtcctaggtctagggttctgatagtgagagtgaaagttgctcagtcacgtcccgactttctgcaaccccatggactatacagtccgtgggattctccaggcgagaatactggagtgggcaacctttcccttctccaggggatcttcccaacccagggatggaacccaggtctcccacattgtgggcagattttttaccagctgagccaccagggaaacccaatagtagtggagtaggtagcctatcccttctccagcggatcttcttgaaccaggaatcgaaccgggatctcctgcattgcaggtggattctttaccaactgagctctcagggatgcctggggttttaataagtggtttgaaatattaatgccagaaattgaggcttaggagttttgtggagagatgagtattgaaagatttgaacaagataattgaaattgagagtatatttcagagatcacaaaatcacaaagagttactgacagatctgtaagattcccttttgggcatgtgcctgtgtgtgtgtgcgtgtgcacgtgtgtgtgtatgtgcacgtgtgtgtgtgcctgtgtgtgtgcacgtgtgtgtgcctgtgtgtgtgtgcacgtgtgtgtgtgcgctcgtgtgtgtgtgcctgtgtgtgtgtgtgcacgtgtgtgtgtgcctgtgtgtgtgtgcacgtgtgtgtgtgtgtgcgcacgcgtgtgtgtgtgcctgtgtgtgtgtgtgtgtgtggtgaaatcttgcagttggtgccatttaaagcttctggatgaccttcaaaggtcagccttatggcatctcaccttccagatcttcaaaggcctctgtgaaaagagcgagtcctgcacgaggtcatgaaggtgaaagtgacgccgctcagttgtgtccgactcttcgcgaccccgtggactgcagcccaccaggctcccccgtccctgggattctccaggcaagagcactggagtgggtggccatttccttctccagtgcatgagagtgaaaagtgaggtgatgccactcagtcgtgtccgactcttcgcgaccccgtggactgcagcccaccaggctcctccctccatgggattctccaggcaagagcactggagtgggtggccgtttccttctccagggggtcttccctacccagggattgaacccgggtctccagctttccaggcagatgctttaacctctgagcccccagggaagcattaggtcatagaggcaggctaaacaaagtcagcataatgctgtctgacagacttttgctaagagtagaaagttcagccagagtcaggagctgtccttcatgcctgtttaatctaccacttaggtgatgtaatgattttagagtacaaaatctaagctgagaaggatataaaatattttttatcttgtttatataaagtataactaaagaattaagctttatttttagtttagtgcaaagtagtataaataagacggagaaggcaatgacaccccactccagtactcttgcctggaaaatcccatggatggaggagcctggtgggctgcagtccatgggatcgtgaagagtcagacatgactgagcgacttcactttcacttttcactttgatgcattggagaaggaaatggcaacccactccagtgttcttgcctggagagtcctagggacgggggagcctggtgggctgccgtctatgggatcacacagagttggacatgactcaggcgacttagcagcagcagcagtagcagtataaataagaaatcagaattgatccctaccagtaaactcatggtggagataactcccattgatggtcagatgggagtggagtaatgtgatgcatgatatgaaaatgacagcagtgtaaaaaaaatacaaagtacaaattcacatgctagtaaggtaatactcaaaatccttgaaatcaggcttcaacagtatgtgaaccgagaacttccagatgttcaagctgaatttagaaaaggcagaggaacgagccaacatccattggatcacaggaaaaagcaagagaatcccacaaaaatttctgtgtaattgactgtgctgaagtcttttactgtgtgggtcactacaaactgtagaaaattcctaaagaaatgggaatattagacctgcctcctgagaaatctgtatgcagatcaagaaacaatagttagaaccagacattgaacaacggactggttccaaattgggaaaggaatacaacaaggctgtatattgtcaccatacttatttatcatctatgcagagtacattatgcaaaatgccagactggatgaagcacaagctggaatcaagattgctgggagaaacatcaataacctcagataggcagaagacaccacccttatggcagaaagtgaagaggaattaaagagcctcttgatgaaagtgaaagaggagagtgaaaaagttggtttaaaactcaacattcagaaaactaagatcaaggtatctggtcccatcacttcatggcaaatagatggggaaacagtgagagactttattttcttgggctccaaaatcactgcagatggtgactgcagccatgaaattaaaagacgcttgctccttgaaagaaaagctatcacaaacctagagagcctattaaaaagcagagacgttactttgctgatgaagtttcacgcagttaaagctatggtttttttaaaatataaatttagttattttaattggaggctaaattactttacgatattgtattggtattgccctacctccagtagtcatgtactgctgtgagagttgggcttcccaggtggcgcgagtggcaaagatcctacctgccagtgcaggagacaagagtcacaggttccatccctgggctaggaagagcccctggaggagggcatggcaacctactccaggattcttgcctggagaatcccactgggggaggagcctggcgggcgatagtccatagggttgcagagagttggacacgactgaagcgacttagcacagatgtcagagctggaccataaggaaaacagtgcaccaaagaatcggtgccctgtgtggctggagaagagtcgcttgggcgtcaggcagtcagaccagccagtcccagaggaaatcgacctgaatactcactggaaggactgatgctgaaaggtgccagagagtcgatgccctgtgtggctggagaagagagtcccctgggcgtcagggagtcaaaccagtcagtcccagaggaaatcgacccgaatactcattggaaggaatggtgctgaaatgcgctggagaatcggtgccttgtgtggctggagaagagagtcacttgggcgtcagaaagtcagaccagtcagtcccagaggaaatcaacccgaatactcattgggaggcctgatgctgaaatgcactggagaatcggtgccctgtgtggctggagaagagagtcacttgggcgtcagggagtcagaccagtcagtcccagaggaaatcaacctgaatattcattggaaggactgatgctgaagctccagtactttgaccacctgatgtgaagagccaactcattggaaaagaccctgatgcttgaaaagatagaaggcaggaggagaagaggatgacaaggttgaatggcatcactgactcaatggacatgtgttccagcaaattccaggacactgtgaaggacagggaagcctggcgtgctgcagtccctggggccacaaagagtcagacacgagtgagcaactgaacagcaacaacaaaaacaaaagtctctgggagggagagggataaacttggagtttgagattaacagatacacactattataggtaaaatagataaacaacaaagatagcaagctatattcactatcttataataacctataatgggaaagaacctgaaaaaggatatatgtgtgtgcgcgtgtgtgtatgtgtgtgcgtgtgtgtgtgtgtgtgcgcacacgtgtgtaactgagtcacttggctgtccacccgaaactgacagaaggtagtaaatcagctgtgtgtcttagttgcttagtcgtgccctactctttgcaacccccagactgtaaccggcagccttctgtgtccatggaattctccaggcaagaatactggagtagattgccattcccttctgcaggggatcttcccgacccaggagtcaaacctgagtctcctgctttgcaggtagattctttactggctgagcaaccagggcagcccatcaatcaactatatactcaattcagaagaaaataaaagtctacctagtcccccttcgtatgcatccatccatttctcctcccaggaaaaaatgtgtgtctgtgtgtgtgtattcatttaccagtgcatatcatattttttttaaacaggttaagatgtcatttacatacaataaaaatgcactcatttaaagcatacaggtcaatgatttttactatattgacagagttctgtagccttagaacacgttcataattcccgaaagaacccttgtactccttatcagtcataccctagttttctccctctgcttaaaactctttccaccccaccctaggcaaccactcatctgattcccatccccgtggacttgcctattctagatgttttgtgtaatacagtatttggcaggggttgggggagctggtggcgggcttccttaattagcatagtttttgacgtctatccatgttgtagcatgtagcgatacttcgctttttattgccagttaatattccattatggatataccacattttgtttatccattagtcacttggtaggcatttggactgtttccactctgttcagttcagttcagtccagtcactcagtcgtgtccgactctttgtgaccccatgaatcgcagtacaccaggcctccctgtccatcaccatctcccggagttcactcggactcacgtccatcgagtccgtgatgccatctagtcatctcatcctcagtcgtccccttctcctcctgcccccaatccctcccagcatcagagtcttttccaatgagtcaactcttctcatgaggtgtccaaagtactggagcttcagctttagcatctttctttccagagaattcccaggactgatctccttcagaatgggctggttggatctccttgcagtcctagggactctcaagagtcttctccaacaccacagttcaaaagcatcaattcttcagtgctcagccttcttcacagtccaactctcacatccatacatgaccacaggaaaaaccgtaggcttgactagacggaccttagtcggcaaagtaatgtctctgctttcgaatatactatctaggttggtcataacttttcttccaaggagtaagcgtcttttaatttcatggctgcagtcaccatctgcagtgcttttggagcccaaaaaataaagtctgacactgtttccactgtttccccatctatttcccatgaagtgatgggaccagatgccatgatcttcgttttctgaatgttgagctttaagccaacttttccactctcctctttcactttcatcaagaggctttttagttcctcttcactttctgccataaggctggtgtcacctgcatatctgaggttattgatatttctcccggcaatcttgattccagcttgtgtttcttccagtccagcgtttctcatgatgtactctgcatataagttaaataagcagggtgacaatatacagccttgacgtactccttttcctatttgggaccagtctgttgttccatgtccagttctcactgttgcttcctgacctgcatacagatttctcaggaggcaggttaggtggtctggtattcccatctctctcagaattttccaccgttgattgtgatccacacagtcacaggctttgtaactataaaaaataatgctgctatgcacatttcccatgcaagggttttttttttgaaatattttttatttctcatatggttccttactctacatccagcattttgaggaactggcaaaagctgttttgcaaagtggctacaccattttacattcccaccaacaatgtatgaaggagggttcacatttctcagcacacttgccagcgcttgttgtaccttttttattacagccatttgaaggggtgtgaagtggtatcttactgtggttttgatttgcatttccttggcgactcatcatgttgagcatcttttcatgtgcttttttgagaaacagctctttgggtcctttgtccatctttaatcaggttgtcattttattaagagttgtgagagttgtttatatattctagagacaagattctcatctgacatgatgtgcagatattttctctcatctgtaaatcatcttttccctttcttaatggtgtcctttgaagcacaaacgtttttaagtttgatgaagcctaacttatcaatattttctttcatcacttatacttttgttgtcgtttctaagaaatcacttcctaacccaggatcacaaagatttactcctgtgtttcattcttaaagtttgatagttttaactgttccatttaggtctgtgatccactttgagttgattttctgtggtgtgagatagggattcaaactcattcttttccatttgggcattaattgtgtttgttggaaaagcttgttctttgctccattgaattgtcttgcctctttgtcaccataagcgtaagggttcctttctggacgctcagttgtgctccgctgatgtatacgtccgccctaatgctagtgccgtgctaccctgattatcgtaactttgtagtgttttgaaatcagctaatctgagtcacttgcatttccatatgaattttaagatcatctttgttgatttctgcaaacaattccttttttaaaatattggtaaaaataccatttgtcatcactgcttttaaatcatagtcatgatcaaatcagatgtatatcttacttaataattaatttaaaagcatattttacaatgtcataggggcttcccaggtggtgctagtggtaaagaatccatctataggtgcagtaagtaggcgcaggaggcaccggttcgatccctgggtcgggaagatcccctaaagtaggaaatggcaaccccctccagtattcttgcctggagaatcccgtggacagaggagcctggtggggtgcagtccatggggtcgcagagtcagacctgacagcgtgtgcacatgcagtgttacagatttgttcagtgtttcagttactgcgtttcagtattatcatttttcctttataatcctatgtattctcctgtgtatttaaaaacattattctgaaaaggggaccaaagtcttcaccagaaggcagagtagttcatggctcaaagtgatcaagagcccatagcatggataggctgaagcgaacagcctactcactgaaaagatcctgatgttgggaaagacggaaggcagaaggggaagagggagacagaggatgagatggttggatggcatcaccaactcagtggacgtgaacttgggaaaactccgggagatggcgagggacagggaagcctgtgctgcagtccatggggtcaaatagccagacacgactcggcgactgcacagcataggtgtcacttgagggactgctccaagggcctttgcttttaatgctgggctgcatcgaatgtactgattgaagacgacctacttttatgacgttttccactctttagagaattaacacctggtgtcagcgttcttatagtggcaatgaaatctggaataaaacaatcaagaaggcaagaagagtccatctatagggccatttcttggcgtttctgggtttaatttgacatactttctcaaatggagattggcctcactcaggaaaataaaactctaatctgtagctatgtttggtttctgagttctttacttggacatttcaaaattcaaaatgaagtatgtatgcttcattgttatcctagaaagtatcacacacaaaaaagactgtaagtgaatgaccgtagtaagagtctatttatatgagatttttaattgcaggatgttttttcattgaagtgactcccaaaattgcatgagaagtgtgctgtgcaaggctttcttttgccaggcctccgtgtgcaggagctcagcttttgttccctgggcagtgaagatagcagggcaggaaagggaaggaaggtggggtcaaatgtctcaaattagggttctcagtcctatggggtcacatggactcactcttaaggattcagaactcctaaagccatgtgtacattgcttcgtcttgatgataatttgtttaaacttattttagcacttctaaaaataaaaacttgcgagggtaatttttatatccgagattttagttccttaaagtctctttcccaaattggaatatttagggattttttttgagatttcctctttccgttctcttctttatatgattgaaagttgggaaccttcactctctggaaaagataaatggggttccatgtgtctgaaccagtgaagtcaggctcctgccctactctgctcacagtcagggaaggaaaaaggtgaagagttcagaactgagctcaccaactgccagaaaagagggttttgaggcccaatgtcagtcacaaaaaaatgggtaaatgtgaacctttttccatagttctttatgtatttatactgggggggcatgttaatctggccttgtcctccatgctaaattccaactgtaaatgcattggaagaaggaaaagacgtatttctcttgggtctgttgactgtcgaggctaccgtggagcgtagcgctcaggtgggctcagcgcccctctgcgtctgaggtctgggcttgccgagctgggctgtggctgtggcttcagggagcaggcttgcccagcgcgccacggaggctggagcagcttcagagctcctgtctgtgtcctcaccagttcacggctttgcttcctttttacttttaaggccttttaacattgttttgttttaatctgtagatgcatagattgaaagtacctaaatttttctgtcaattgcccgaagattcttaatatctaatatctgcaatatatatttcttatcaaaaagacatgaactgttagcatataagccagaggtcattgtaatcctgatcctgaaatgaaattctgatttacaacgctgttgaaaaggtgtgttttctttaaaaaaaaaaaaaaaatctatgttcacttggtgtatgtgttgtatccacgttttagatttctgaatattattaaaaatcaaactagattttacttttgggaatccagtgttttgtgaacttacaagtatttggtgtttaattcatggtatggggctgttcaaaaaaaaggaaaaatgatttagatacggcaggtatggctcatatactattatacataaatacatgcagtaaaatcagtattgtctcagtagcaagtaataggaaaataaaaccagctcttggataaatgatgaaggaaataaaatgcaagtctagatttgatagcaatatctacataagaccacttattttatttatttacatattttaagggaatcttatgagcatttaggattgtaacgtctgcctttgtgatcccctgtgttactctagttgtaatgaagagggccatatgtggcaataagaagcagaaatgctgagacctttgtggaccctctagcaatcagtgaatatcagatcacaaatctccccagctttaattacaggcaaaagaaaagacaaaattagcattttaatatagaaatatcttaggctttaggagaattatgataaatctaatgttgcctagtgaaccaaagaggggatattacaacaaactgtctccttaggaatatttgtttaaataaaggcaacaatacttcatccttatcttttttgggtaattatcgctatttcaggctgttctttgttccaggtttaaaatacctttagttggaaaaaaaagaaaaagtaattggcagtgtttgttttccataaaactataagaagggaaaaatcctgtttgcttggcactaaccagaaaattattttagggagagtttttgctctgcagcgccagttcactggtgccgtggcggcccgtgcacttggatgtgtttaggttgcctcatttcagctccagcgtattaaaacaactcctcttccagggctgaggtttgcccacctgtctcccctaaaacacctgcaacatatgtttgcataaccctgtaatgctttgcctttggggtgctgagaaattcccccagagctttttgcttataaacagctgagcaattcgtttttctaatgacggttgcttttcccccagcattgaggcaataacatattcactaaaataagagtctcatttttcatcaaagagaaacgttcgacatatttctacagtgctgtttctccttccgagccttgtttttccccttttctaatctggcgtgctaaaaattaagagtgggtagcaaggtatcagggaaaagaaaactaagtaattcttcatttggcaaacattttcttcatgccaaacagacattgtatttacattgtaaatataaatcaaccttttcaatttgacaaatgctacaggaactttatcagtttaatttaatgtaaaaactgtaaccaataataatttggacatattgtaggaaatccctttaattattttaacctcattagctggcaaacaactgtgctttaatagaatgtggtttacagtttttaaaaactggtatgtgtatacacactcctgttctgatttgtaagacagattttctccacacctatgaggcccaatgtgtacaatatatgttcctaaatatgtgttacttttctaaaacaaatggaacgtttggtaagccctgccctaagtttcttgatggttatcagaaggatggaacactgctttctctaccagttggccattgtgattttaagtcagtcaaacgatctgatctactgtcaacatcctgcccatcagcgttcaggggtatcagaagggaattctggcttctgttttctggagcttttccaaagtgcccaccactgtgccacgctttatgtccagtgcccggtttaaccctttccgcagttttgcagatgaggaaatcagcaccagggctgtgagtcctccacaggcaggcgtgggtggagtggactcgaacctccctgacccccgaccccttgcctccgccccaagcagcctgagcccctgcagcagacggcgggccagccacagtccctgcgtgtttcacatcgaacttgagccttcctcaccccctgctggtggttcgccagagccagggttgctggccctgggccgctcctgcctgctcagttccatgcgttgtcagcaccaggcctttgaaagccactgcgttgttcaagcgggatgagtccctcggactcttctccttctgaagttcccattaacggtgcgaaaggagattgtcaaccgcaggtgagggaccagagttagggggtcagtctagagtgttctgtctgtaatgccctttgtggatgagtttgacctcaccaggctcagaaggttgtcacatttcaccttgtggttgagtgtgcttctggtggtagctgtgcttggtgtgggtcagcactgaaggactcgcatactgccatttagtggtgcacttggggctttcccagtggatcagaggtaaagaatccacctacagtacagcagtgccaacaggaaccgtgggcttgatcgcctggagaaggaagtggtaacccactccaggattcgtgcctcagagatcacaaggacagaggagcctggcgggctacagtccacggggtcacagaagagccagacacaactcagcacctaagcaacgtactaccctagaaaagtgagtttgaacgtgaaatccggaagtattattgcgagggtaggagtggcagggaagggcgtctgtcacagagtagagcagaggggctgggccaccatccgaggtcacactcggtaagggagagagcgtctcacctgaaatgacacgaaggctcagcttactgtctatcccatggacctcagaagtgaaggatgttaactgcaacggagaggttaggattcagtctgttttgtccctagcatcgattgctgtcatttaggcactccttgtaaattgacttgatcatgccaaattaacaaaagcactttgaaaattcagaagtaccacacgcgtccggtctttcccatgtagttccctctaggactttcgtttctgccattatctatcctgcttcggttaagcactttggcccacagggctctaggctgcctccccaggttccagctcatctgtcccgagggtgggagtctcagctttcttcctgtgttgccataatgtacgatgctgaagaaatggcaacccagtactcttgcctggacaatcccatggacggaggagcctgttgggctacagtccacagggttgcaaagagttggacacgacggagtgacttcactttcacgctgctgaagagaaagccttcagatggacgagctccagtaggttgttaacagaggaggggatggtacctgggaagtaaatcagctgcaatcttgtggaagatttatttcaagtccatccaggttggtctagggaaggcacagtaaatccagggtgaattcagcttgtgatttctgcattttcacgtgtagttatgtcgacttctcagggcatgaaacgtaagtggttatgtctctgtacacagcccactgtaagttaggattaccatcttttcttctgatgaaaaagtctccccccaaagtggtgtttctttgttgctgttgttgttttgttttgttaatgcacattggcttggaaaagcttacaatacttgaaatcttgactgtgtgaaatgggtttaaaataattgctaattgtcccaatcctttgccaaagacttaccaggttaaagttgtcgacatcacgtgtcctgaacaatgagatcttacaactgtcgtggggtctggtctttcttaaataaagagtcttatgtgtgtagaattctagtggctcttaaattttagagaaaattccaggtctgtaaaaagtaagaattaaaagctgctatattcctattcggtttggaaaaaaattctttaaaacaagagagacaaatatcttcttacttttaaaatgatttcactgcataaggttagacttctgctcatggaatctcatcccacctcttacatagttgagtgagaagttactgctctaaaatttcttaactttgtaaaactatattcagaagaggcaaaagtaactgaattaattcattattgaccagagacatattaatacgtcttttgttacccaaacattattgacctgagacatttcgagattcacttaataaatcgccagccacaggtattcgtttctgcaaaaacctctcagtcaataatgtgttaaaagagaagcattataggtgaattaaagaactgtcagtactgaatcttactgtataaaagtatgtgccttttataaatatgtgtctatatgtgtgatttctgtagccacatgttgccttacttacatatcagacatttggttctgttctgttcattatagtggctgcagtcttcttgtggccactgagcccttcaagtgtggctggtccaaactcagatgtgctatctgtaaaatacatgctggatttcaaacactttatacagaagaaagcatgtaaaagtctcaatttttatactgattacatgtttttagtgtcaacattttggataagtcaaatggaacaaaatattattatatgtactttcactctgtttttttcctctttttttatgtggcttgctagaaacttttacattacatgtgaagcttgcatttgtgaccagcattatacatctgtgggactgtgctagtctagaacgtccgtggtatacctacttatgtcttagtgacagcagatagaaaatcctgttgaataactttcaactgtaacctctggttttattttcttacatttcaaatactgtttttcaacatcatcttttcattcttttttttttcctacccctgtgtggtgtcactttaagccgcctcttcatttgatactagtaagtctcctaggaatttaaatagacctcggtgaaagccatacttgagcctcattcatatgttcaagttagatcatcattcctaataatggctttaagtgctttggtggatcggcacttcatgtcttgaattgctgtcctttctttataaagatatttcaagaaacagcacggtgcctccccttctttcattgttttctagcaaaaggtaacagaatccttcattaatttattgaaagtcagagaagaaaagccttttatagtagcaaaaacgaaacgtttccaagtactgagaataaggagcaaaactggtcatgagtgatactcttaggaaagttaattttaaaaataaatcatgaatgcactgtcagtctgccagtggttttgacccctgtttcattttcccgttatgcttgggtccaggttgtcatcagctaccacaaggaaacctatgtaattcctagagagcgagaagttgcactgttaggcttaatagtacggtagtcatggaggcatcagttatcttcatcaaggcaattcagatctgattattgtggaactgtgctgaataccaaaccagtggagtagtagctggagctaaatcaagggattgtcatttttgtcagatgattagggctgacttggaagagatatgaaagggttgagctgtgtaaatactctcttttcagcagaaaaagaaaaggtccattacggccttaagatgcagcttgttagcttgatgaatttcaaactatttaaccttagcaattatgtcccccgcctacatgaaagtatatctgtgccttggggttatgtctccaaggactgatatgaaagcatgttgataattttctattaaaataaaattcagcctttctgtgtctagttggttctctcaaaggacagggcgtgctgtttcaaggtccaaattattaatttgaattacatgtttaggtaaacactggatcacatttacttgttttaaaaaaacttcttaatgaaaaatatgtagtttaaccttttagaggtgatgatattcaggttatgctattaacgtgttacattttttaaaaagtgtggtttttatagaagtgtatttgattaatttttatttgcccgaacttgatacttacaaattatagacacattaaataatagcaacctgtttaaatagacacacccaacctaatgattcaagaacatttctgcaagtttataaataatattaaatgccagaaagtgcagtgtgttgctgcttttataaaaatgtgcgttgggcagtttgctttcgtattgtggtggtaccctgataatatgtccactacctgggcacttattcaactcgtatgtaagaacagatgacatagaaactgctaacttggaaagaattgccgaattccagaataatacattcattttagaagaggaaagactcagtgtgccatctagtgggcgtacttggcatcctagttgtcaaaaactggtttttgctcttcttcaaaatgtagctttcttaaccactgttgtgtctcctagccctaagaatagattgtactggtgttacatcttacataatacctcagttttgttgtcattttatcttgattgtattttggaaaggcatattgaaactgatcaaaattattgaaatctaatggaaggaatgaatcagtgtgacctgagacaggtaaaagtaaaatgtactaaataattttagtgtttaatcagacaaagataagttagggcaaaacttcaacaatgaaaaaaatacccaagcacattaattattaaacatcattattatatgtatttttttctttgagtataaaagcgatcgtttcatcattttttgtcttaatatacaaatcatataattttatacattttaacttcttgctttttttctgtagagaaatccaagaccagtgacctaccagttccatccaaatctggattattacaaagcccgaggagcagacctcgtaaataaaagccggtgagtcctctttctctgatggacgttctgagtcactaagatgttcttggagattgtcaggagatgttacgcatttgctgaaaataattttccaggttttagcatatcagtggttaatgcatgtaatgaatctctgttaaataaattatctgagtttttctttgaggagtgagaaaaggatgtatgttgatgtcagtggtcataaaaattaaataaataccagagtacttgttacagattgaattttggcaacttcatttttccaacactaataaacctaaaataaattatgcctacatgtataatctctttctagatcctttctgttgattgaaaagaggcagttctataatatatgtttaaattatttcagtaacaaaattaaaattgggtttcccaactgtctttagaactgcacaataagcttataaatgcatcttatgtgtgcatttgtgattacatacatagaaactttaagggtcactgtaggaataaaaaatcattaaaatcctacttttaaaagaaattcccacttgcataaagggttgatgaacagttttgttctttcataataccatactcagatgtctcaagagttgacttgtcaaaccagaaccatctcaaattagagcttaatttcgaagtttattctgaaagactgaaatgttagtcatgataaatgctgcaagttgtccagattttcttcctgaagcattttgattgttgctagcttttcttcagtagaagcccagcaacctaagtatacacggatggagtagacttacatggtatgttcttctcttactttgagttaaaaaaaaaaagacataattcctgacacattgaagcccatagtccaagggatgagaaggattttataagaacacagccatatttaaacctgcagtatttttaaatcgtgtgtccctgtccgaagcctgccccttactctgaggggctgtgtgcttatgagagcagttcccacgaggctctcggaagctctggttttgccgtgctgggtctccgtggcgagcacaggctctctctggcgacagtgagtggggcgctctggaggttctgggctcggaggcgtcagaagctgtggcccgcgggctccagagcgttggctcggtacttgtggcgcctggatttagtcgctctgtggcatgtgggatcttcccagaccagggattgaaccagcgtctcttgcactgcaaggcagattcttaacccctggaccaccagggaaggcctgaagctcttttctgtttgtccatttgatttttctttcacagataaaaaggttcattccctatagtcacttttgttcatttagtttcacaaatttttctggagtgccagactgccttgcagagagtggacaaaccggagaaaaatccctgccctcaggagtcttactgtctagccacttgggtttcctttctctcttgtcaagcatggaggctggatgtgctctttaaagtgtgtgtaaggtcctttcttcatgcagactcttcctagcaggagtcccctctggcccctgggctccaccccacacccgctgtgtgccaccctggccccaggtgagttttcacaggaccgagttctcggtttacagcagagggtaccgcgttcccactgaagctcccgaaggctcagcagtctgctcctctccccctgccccctttcgtctcccaccggagcttgccagggccttccgcgttcccctcgcacctccctctttctctgtggcttcagcgcgaacatcatctcacacaagcctctctctctttaaagccgtattgaggtgtggttgactcagtgctgcgttcatctctctgtccaccagtggctcagttacgcacgtgtgcacccttctgttcttctccactgcagctcatcgcagggtgctgaccggggctcccgtgctgcacacgagtacctggctggctgtcggcgtgtagatgagtctgcatctgctcatggcaaactcatggtccacccctcccccccgcccccgccccaccttggcaaacacaggtctgctctctgtgtctgtgagtctgttctgttttgtaaatacattcatttatgtcatatttcctggagaaggaaatggcaacccactccagtatctttgcctggaaaatcccacagacagaggagtctgacgggctgcagtccacggggtctcaagagtcggacacgactgagcgactccaccaccaccaccgtgtcgtatcctagagaccacatccaggagatgtcacccagcatcgggcgttctctgacttaggtcacttagtagcataatctctaggcccgtcatgctgccacagatggcagttatttccttcttggtatgactggatagcgtccacggcatccgtggaccacatcttccttacccgttcatctgcagatgagcatctgagttgtatctgaggcttagctgctgtaaggcatgcttctgtgcccacaggggtgcgtgtgtctgtctgacacccagcagtggggttgctgggccaaacggcagctctgttcttagttttttgaggaagctccatgctgttttctatagtggctgcaccaatgtgcattcccacccacagtgcatggggttccctttgccccacaccctcttcagcctgtatggcttgtagacttttggatagataatagccattctgactggtgtgagatagtatctcattgtagttttgatttgcatttctctagtcatgagcaatgatgaccatctttttctgtgcccgttgtccatctgcgcgttcacacaagcctctctcggtctctgttttgtcttcacctcccttgatccctctagctgattgctccgcatcatatgcccctagcattcatttctcactgaagccatatacatatgtaccatctctctgcccagtctccacactgagggctaagcccctgcaggtaggtcgcctgtcttacctcctgagggcacctgggataatccttgctagtatgagggagttgatagctgctgttgtgtacacatgattcttttcttttcttttctttttttttttttttttgcatttttcaacatctccttttcttctttttcaaagaaggaaatagactaccctttccttttccccttcatgttttatcttccatttagctttctgtccctgcattcttctcagaagtgttggttctgttttaggtattttcttataagcacattgagattcctatatgcagtgtcactgtaaagactagaaggcagctttctcatcatcaccatggcagtttcagagcctgaagctgaaagtgaccaagtgcagtgcagtgtgtgaagacaccacagacaagttgaagttcaaagatggtgttggggaacttgacaggtcttttgaaaagatatcaacttataactttaacacataccaaaacaaattctgaattaatcggaattcactcaaacaagcaaacatagaaataaaacccaagggcctgtctgacctctagttacttgacttttgatccttaaaagtcatggaagaaggcacaaagggaaggacctacggattttattgcacaattgtttctgaacagatatgtcagaaatgtttttaaaaaatgaatcaaaagcaaacagaaaattggggagatatttgtaaaagaaatgactgaaaaactataatatcattaatgtgtggaaacttgcacagttcagtaagaaatacaagctcctgactcaggggctgtcccatctcctgccatactcttctctgccccgaggacctcagcccagttcctggcgtgggttccatttgtgactgaagggcccttcgtttgtgtcttcagcctgacttctttcctcaaactccaggcttgcttgattgcactgaactcttggtttcacctccacacacctgttcctccctaaccgggaatgtcttgaccggctgatccagccttcgaacgccctgggctcctctctctccgtgacgtcacccgtcaggtccatcagccgtgcctgctcgagctgtatcctgaagcagtctgtttcccctctctgccctgccgatactgagtcttgtatcccggccagtccccccccccacggcctcctaacgcgcctcccagtgcaggtccgatcttcggcgcttccgctcagagccctagtggctttccagcacgcctggcctcaggtccagcgccgtgcagggctgcacggaggccctgcgcgacccggctcctgtctctgcaccccccgtctgcgcggccgcccggcccgctcaccgtcccccagctcccggtcagcccccttcaggagctgtgagctggctctcgccgctccgggctctgccctgagaagccgccctgcgcctgtctgtgcagaccccgcctcttcagggagcccctccgcggccgctgtgtctaaagtaacggaccccttgactccctttattttgctctcttactgtttttgcttttgtggggctttttaatagcagttcttactacctgaaatggtatttttagctttttattctactttttgtgtgtttttattgtttctcacattgaaatataaattctgcatgttttattatctgttgtatcctcagcacctaaaatagtgccttgaatatagtatggactcaataaaagaaggattgcaacagcaaataaacatcaaaaggctggtcaaactcataattagtcacagaagtgcaaattaaaacgcctgtgaagtaccatttttcacctttcaaaatagcagattaataacaaatgaggcagagatgagtaagtcctagatatctactgtacaatactgttatgtacctaagatttgctaagagagtaaatcttattttaagggttcttatcacaaaaataaaaatagccatgatagatagggtaggaggaaacgtcaagggatgagggtatgtttatgtcacagattgtggtgatgcctttgcaggcgcatgcttgcctctaaactcctcaagctgtgcacatgaagaagacacagccgctgcaggtctgtagagcctcagtaaggtgacttgaatgagtgagcgaatgagtgaccgagcagaaggagcgtggatacccgtggtcaccggtttagggaatgtaagttgaaacaaacttgatcgtcttgctaaataatactcccacgtctatatgtagcccttataactaccgcattcttcctcttagaagttggtttattgtgccattactttatctaggatgaaaaacctattgtagctattgtgaaacctactgtgaaacccttggcaaaagtccccctttagctatttaatgcccaagatgttttcaccaggctggacccttaagccatagccttacaactactttctcagctatttagagactattaaagagttcatgcatcggggctgtaccgagcagcaagacaggctgtggggctgatccagagggaagacacatcttcatgggggaacctctggcggtgatgagtgagtggaggacaggcgagggcgggcaggtacctggagggcagggagctaatccatgccacgtctggatgcagtccacaacagtggacttctgtttgtgctgcttatccaaatgagagatgaggatgcaagatgacatgtgatttcacggataagaatatctctagaaatcaagaagcctgatttctcttctctgccttaccatggattgctgtaattaagtctttaaaagcaagtgcctaggtattttcgtgatagattttccattacgtgtgtggataacattcactgtgctctgattttacttagctgcacatttctttttaaaaatgggaattgacatttccttattcattcaacttttgagctcagaacaacaaattaacactcaaatcctgctccaattttgtccttaaataaccataaattacttctataaataaaaataagcacatctaaattgtgaccagtcttcagaaagacccgtctgatttattgaggagtttgtgacttctgaaatgcccaattgagtattcatggaacggagcttcatagttttaactattgcggtctcttagagtaagagtgaactcacagcctctacattccagagcactcacagcctttcacagcctctaccttccagagcactcacagcctttcacagcctctaccttccagagcactcacagcctttcgcagcttctaccttccagagcactcacagcctttcgcagcttctaccttccagagcactcacagcctttcacagcctccacattccagagcactcacagcctttcacagcctcgaccttccagagcactcacagcctcgaccttccagagcactcacaccctttcacagcctccacattccagagcactcacagcctttcacagcctcgaccttccagagcactcatagcctttcacagcactcacagccattcggttttgaaagtgccacaacacagtttcttatgtagtttctctgctctcgcagaggtgatgaaacatccacacctgagctggcagcagggcccaggccacgtgcctctttatccagtggccctttttacgcagctccacgactggaggtcttctgatttacttaagttcatatcaccggagttagtgcttccacttgattgagtgaggccttgacacagacggaagaagccaagctgggttccagaccagcagcagcgtcctccatgctggtcccccagctcccctctgccccgtgtcacagccgcaacaaccggactggcgtcagtaacgaaagatgccagagttagagctctggccagtgggcccttcccaagaggccccctgtctggatgcctgcatggggtccacctggaagccaggctctgggtacaggcgcttcccagtaagggagcctctgctgggctctgccgacggtccccacttcccgctgctgggcgccgggtgacaagggtgggcggtgtcctgtccgttttcaccccaagaatgcctggtgcccagggattctccatctcttctcggaatcggagtctgcctctgcttaggagtcttcttctcaggccctggcctactaagcacgtcctcccagaaagcgcagaccttccaacatttgtcttatacccgcagccaagccttgtgagggcaggcccgcgtctgcccgtgtccctgttgtctcctcattacctggcgtggagaacgcgttccagcatgggtgaaatgagcaagcactttttggctgcatttatagagtaaccacgctgatgtcggggacagaatcctcgtattcccagggcctagcacaggacctggcactgtctctagtactcagcagtttaacgactgaataaataaatactgttttgaatacctaaaaggcactataaaattcttctagctaatttccatattatatggtccacaagaatttttaaatgaggctttattatatttactctgaagtattttattgctaaaatatggtaaagaaataatatgctaataatatttcccgagtcatgaagccaagaagtccatggttatagtccattagtagttaattggctaatcagaatttcaaaggacactgatttctatataaatgtaattttgtgatatttttatgctcaaataggagtttgtgttataagcacttctgtgtctgaaatgctctttctcttgtatcaaagagagttgttaattcctaaccaatttaggtaaattggtaacactatctcctttttagggcagagtaaataaatctttctcctttcttaaaaaatgtaagtataatttgtacataagacacagatcctaagcgttcagtctgatgagttttgatagctgtgtatactgcccgtctgcatgcaggctcagtcgtgtccagctctctgcaaccccgtggactgtagcccgccaggctcctctgtccatgggattctcaggcaggaatactggggcggtctgccatttccccctccagggaatctccccaacccagggaccaaacccgtgtcttgtgaccgccatctaagacagcgtatctggagtgaacattcctgtcacctgagagtcccctcctgtcccgttacggtcgcacccaactcatcgtctcgaggcaaccacttgatttctgctccctcattttgggtttccccttttcttggtcttcccatgagtagagacacatagtatgcacttcttttcattcagattgatgtgctcacacttcatgcagattgtttcatatataccagcagtttccttctttgcttgggctgtattccaccatacgatgtgccacaaatgttttgctctgttgttgacaggtagtgggctgtttccagatttggagtgttttgagcaagaccactgtgaacattctggtgcaagtgtttcgatgttttcatttgttattgttgtttttggtggatatatgtttatctttcccttggataaacacttagaaattaaattactctggctcagttgctaaagaatctgcctgcaattctgggagacctgggtttgatccctgggttgggaagagcccctggagaaggaagtacaagaattacaagtacaagtactagccccactctagtacttctgcctggagcatcccatggacagaggagctcggtgggctgctgtccatagggtcacacagaggtggacacgactgaagcgacttagcgtgcacaggatagatgtgtgttcaactttgtaagaacctgcggactgtttcaccaagtagctgtgccttttccatgctcaccggcaatgttcgggagtttccattgctcttcatctttgccagcatttgctgctgtcagtctttctgattttacctattgtagctggtatgaaatggtatctcactgtgtattaatttgcattttcctgagcaccttttcgtagcacactggtgattcctctttggactgtccccgcagtctgcctgttttttaatgggctgtttgtcttttttattcttgagctgtgagattctgtgtgtgttctgggtaggagtccttctctgacaaatgtgctgcagatattgtcccccagtgcggagcttgcctgtccattttctccacgatgccttttaatgagcaggagctcttcattccggtggcattccttcctcagctctgtccctttaggccagtgcgctttgttttctcatctgtgggatctcctgagacccacctgagtctcctttgttcaggatcctgaagaccgggcttggcttcgctggctcactggatggactctcagaattcggaaaagctgttacacccatgtttatggtggtgcatcatggcaaaaggatacagactaaaatcaagaaaggaaaaaaagttggtgttgttgactgaaaatgaacaacctagaaagttgagagctgtgttttacttggcagactttctgaggacttcaagtccaagacaggagtctcaagtcactctgagggcctgacgcaaaggcgcagagcgggaagccaggttacacaggagtttgtgcagtgaaggctgggtagtcagagcttcaaaagatcactgttaattaaaggaaaccagtgtctcatgaaggggtgcagtgcttttctatgtgtgggatacgcaagagtctgcgctcgctgcagtccccccttcaacctgtgcctcgctgcctggggccctgcttcctcaccctgaggccctcgggtgtgccacgcggcggctgcagtggcgggcggctggtcggggcctccggtgcccaccctgagtccatcagcgctcacaggcagggaggctgtgatgtgatggcctgagggcagcagcacctttgtctgctgatgcgcaggcagcagtttcgctcggagtccaggagaggccaggtgtgagggttgtcccctcgcagtggagtgcttcaatccacctaaaccttgcagggctgcgcgcaggaagtgctgcccccggggacgttgcccagcacttggcgccctcggggttctgttggaggtcattcgtgcaggcagggagcagccctgtggtgacattagctgtctgccttccggcccctggtcagacggaggccatgtggcagggcccaggtggagacagactttcagcctgattcccactgttagcgtgcactctttgttgtggttcaaagtccaaggtctacaaagacatgtttatcagacagacattccaagggctagagtttccctcccagttgtccctgcagggtgggtcctgaactggagtgtgcagggtttggggatcccaggcacgctgacttaaccctgaaagttccagagatactctgtattcctctcaaaactggtgtggtgctaacagttgtattagatctgtggtccatgtcaaatcagtgtgtgtggagtgaggtaaaaattgaggtccgtctttttcaatccaagtatccagcagttggatactagttatgtaaaatcctctcctttctccattgaattaaactgggtccctggctgagaatcaatcaaccatagagataatcagtagttctggacactgagaatcaatcgaccgtagagataatcagtagttctggactctctgctttttctagcaccacactcgcttaattatgtagcatcacagcaagtcttgattttcttttttttttttaaattttggctattcttggttctttgcatttccatataaattgtagaccctacgtgtcagtttctctaaaaattattgggatttgattggaatacactgaatctgtaggtcagtttggaaagaactgaaacttcagtaaatccatgaacatgggctgtctctccattcagtcaggcttcacattctctccatagttgtatatagtttttaagagcgcaggtcttatagattggttttcactggagagaaataaattcctcttttttcctgcgtgtcgcctgttcctgcctgggactgcacttttttcctggctgcactggacccatgttgccttgtgagggcttcctctagctgcagtgagcaggggctactcctgtagcgcgagggagtctcggtgcagtgaccgctcttgctgtggagcacaggtgctgggcgcatgagcctcagtagctgctgcgggcggactccagggcacgcctcagtagttgtgacacacggcttagttgctccccagcatgtggaatcttcccagaccagggcctgaacccgtgtcccctgcatcagctggcggattcttatccactgcaccaccaaggttgtccaggctgtacttttttttttaatgtaactgtttgcttggaattttacatggactcatacatttctctatattcattgactcgctttcattaaaactatacggaaagtttcttaaaacatacctttttccttaaaactcttaagagttgattattgatacatgtttaagtatacctgcatgtgattttttttttcaagtgtaaacataagtagtgattctcacagaaggtagacaggtgacagggcaaagctccccaacagtggcagctcaagatggtaccctcttccctagaccagatactcctctgagccacggttcacgggagagacttgcatccctctcagacactgggtcagaaaataaatcagctgaaaacaactgccctggcatagaaacctcgaactttattcctgcagataggtcttagggagttatctcgtgatttttatataaccatggtctatgcacaattgctaattatttgttacattaaacaaatattctcaattatattcagacccagttagctgagccccacagtctagcttatgtcccccctcttacagggccaacttttctggccctaaaagcacttcgtttgcttcacatcacagtaacaaggacttacatgccacacgcaaaataatcatcatctttacagctgaaaggaaacatgtttcacttgaaagattcctaaggaatgagtaatagcaagctaatttttatcaggtagtttttataaagacctataaaatcttgagtttcatgatatatggagagagttcattttctgagatagcagaaacctcaggatatggcaaacaaatgagaattaagtatagatgtccttcattgaagcaagtttgatacactcaacactgaaggtaaagaattaagaaagttggaaactactttgttttatagaatttgaaacctttaacttagaaaatttgtgagtatatcccaaatgttagctcaaatgttagaatcatctcgagaagtactattttgcaaccctgacaactgttttaaatatctaaataaaagatagatgtatataataagcatgaaagaagtaaataggaatcatagtcccgggtaggtcaacaatggcaggctaggaaattatagagatgcaaagagagtatcatttctatcctaaaaccagaaccatgtgtttatatttactttttccaacaacttgcacttaagaaggtaattttaaagtaagttatatatttttatgattgaaaaaagtgtaggtagaatgaggtgagaaaatgatagaaaggagattttgatggaaggaaaggaaaagaagggagaaacgtctcagagggaagatgatcctagaggtggaaggaaaggcaaaaagaatagagaccgagggtggaaaccagaggcagggcagccagggaggcctgcaagcttgagttgggtgtggtcaccatcccacaagggcccacgctggcttccaggcccctctgtgaccttgcgtctcggcaggatatcgactgcgatgtaggaggcggctggcccagcccagcacctgccgtcaacagaggcagaaagggctctccctgaactctgcctctcgccccagccaggaggcctccttgtccgaaaacgatttcctaagctctgcttagacagtcccagaaatgaagttcttacattttaagtggagcctgtgaaatcatcaggaaggatttcctgggtcacagcctttgaactgtctcctgtgactttctgtaactttcgtacctcgtctcgttttcaaagccacgtgcagaagcgctgctcttgctcctggcagctctcctcttggtggacttgtgcccctgcctctttagtctttcctcttccctcataatcggcgtatctccctactactctgccccgttttatggacaaaactcaattctgccagaaattcatgcgtcaccaaaactgtctgccatacttgtacggttacctcctacagcacagacactcacctactcctagtcatatactacgtttgctagtaagtaataatatctgtttactataagacggtaatgtgtgcgtgcagacgccatagttacttttgggggctgtttcacagggcgcagaattctacgtcgctggtttttcttaacattttattcactgcactctcttctgcatcatggctcctgaggaggatttgaatgtggttcttatttttgctcctttacaggtgagctctttctttccccctctggcttttctcaggtgtgttttttttttttcctgtgattttctgtagtttaaaaatgatatgactaagtataacttttttggcatttctattgcctgatgttctctaagctttctggatctttggttggttgcctgacaaactttgtggacactcacagccattgttgtttcacctgcttcctctgtccctttcttttttctccttctgcctttcccagtgcgtggctatgaggccatttacagttgtcctccagctcttggatcttctcttatgcttttcctgtcttttttctatttgcttttcagtttggggagtttctattgaaataccctcgacctcagagattctttcctcagccatgtccatcaataataagcccatctaagacattcttaatgttacagtattttttatctccctcatttcttttttttttctttagaatttcctcctgtctgcttatatttcctatttgttcttgcctgctgtctactttattcattagagttcttaacattttaatcaccatccctggtggctcagacagtaaagcctctgcctacaatgagggagacctgggttcgatccctgggttgggaagatctcctggagaaggaaacggcaacccagtccaggattcttgcctggaaaatcccttgtacagaacaacctggtaggctatagtccatggggtcgcaaggagacattttaatcatagttattttaaatttccagtctgatcatttgatcattccagtatccctgctatatccgagtctggttctgatgctttgttgctctctctcttcaaactatggctttttgcttcttgctttttgagtacatcttttctttattcattttggatacttgggcatattgtgctgggtgaaagaaccccaaaaataggcctttagtaatgtgataagatgtggaggagaggaagcattctgtagtcttatgattagttcagttcagttgctcagtcgtgtccgactctttgcgaccccatggaccgcagcatgccaggcctccctgtccatcaccaactcccggagcttactcaaactcacgtgcatcgagtcggtgatgccattcagccatctcatcttctgtcgtccccttctcctcccaccttcaatctttcccagcatcaaggtctttccagtgagtcagctcttcacatcaggtggccaaagtattggagtttcagtttcagcatcagtccttccaatgaatattcagtactgatttcctttaggattgagtggtttgatctcctcgcagtccaagggactctcaagagtgttctccaacaccacagttcaaaagcatcaattctttggtgctcagctttctttacagtccaactctcacatccatacatgaccactggaagaaccgtagccttgactagacggacctttgttggcaaagtgatgtctctgcttttgaatatgctgtgctgagtaggtctcagtcatttagtaagccggggcctctgggctctgaatttgacacctgcctctcagctgcagccccaccttagggtaggacaggaaggctggagggggctaggatgaggtccttccctccccaggtcagttagactctgagcaggtcctctgatcagtgtttctcctgagggcagactgtgtgagaacagcatgccccggtgtacttcagccggctcctttccctctgcccctgtccgagcatgcctcctcatgggagcagcagtccaggaaagctggcggaaggctaggttggccactgagccctgggactgggtccccttggagactgtggctcctggcgttgtccacgccgggcctctaacggttcggctgcagttacagtttcctgcccctgcgcttgttcctgtgggtttccgctctgaattcacctctcactctctccaatctgagaggagcagtttgccctttgacctcatttcttttaaagagctatgaaaaagttgatttttttttttttcagtttgttcagctttttatttgttgttaggacagagtagaaacttcaaaaattcttacatgctggactggaaactacaagttcacttgcctagaattaatgcaaccctagaattttagttttctccaccatcagcataggctcgggttagccttggggaccaaaccaaaacattcacctttgggagtttggttgttttttttgtttgtttgttttaatatgaattcatgttaatccacacctccctattctatgcatagtgtgcaattgtaaaacattttaacctaagtgcatacgctttttttaatctccattaaattttcttctctcacttacttcccgtgctgcccagttgagagtattgtagactttgttttatccgattggtctcacgttcataagcacatgttctctttcttcgggtcatgaaactgtagggttttctgtccaaaaggagcacagtgtcatacacctcagaccccttggtttaaagatgaggaagttaaggtccagacaacaggctaagtaactcttcccaaattacataactcaatgacagaggattatgaccttcaattttaacaaaatactggtgaacttttcacaggtctgtgaatcgtctgaggagtgcaggaagattcagcagtacacatgaggtgcagctgttcagatacaactaagggtgtattatactcactgacactttgataagacctaatagaggtcagcacttcaaacaagaaataaagctgtcttgttttttaaattagtttttattggggtatagctgctctacagtattgtgttcgtttctgccggacaacaaagtgaagcagttatacgcatacccctctttttaagagttcgttctcctttaggtcaccacagcactgagtagagttccctgtgctgcacagtaggtcttcattcattatctattttagacacagtggtgtacatatgggcttcccaggtgtctcagtgggtgaagaatctgcctgcaatgcaggagcaccagaagacaccccctccagtgcttttgcctggagatcccctggacagaagagcccggcaggctacagtcccctgggtcgcaaagagtcacgcataacagaagcagctcagcacacgcgcgtgcacccggtgtacttatatcagtcccagtctccagctcatcccacctgcccttccccgcctggtatccgtaagtttgttctctgtgtctgtggctctgtttctactttgcaaataagttaatctctgtcatttttctagattccacatataagtgatgttatgcaatatttttctctttaggacttacttcactcagtatgacagactgtggggctgtctgtgcaaatggcacagtttgggtcctttttatgactgaataatatcccactgtatgtccgtatccacctcttctttatctgctgatggacatttaggttgcttccgtgtcctggctgttgcacaccgtgctgctgtgaaattggggtccatgtatcattttgaattatgattttctctggttacatgcccaggaatgggattgctggatcctatggtagttctattagttttctgatgaacctacaaactgttctccatagtgactgtaccagtttcattcccaccaacagcttagcgctcccttttcttcccactttctccaacgtttattgtttgtagcctttttgatgttggccattctgaccagtgtgaggtggcacctcattgtagctctgattttcattgttctaatgactagtgacgttgagcaccctttcatgtgtttgtcggccttctgtatgtcttctctggtgaaatgtctatttaggtcactggtccgtatgttgatcgggttgtttgtttttgatatagagctacgggagctatttgcatattttggagattactcccttgtcagttactttgtttacatccattttcttccattctaagggttctcttcttgtcttgtttatgatttcctttgctattcaaaagcttttctaagtttagttatgtctcatttcttaatttttgtttttattttcattactttttgagttgggtcaaaaagattttgctgcaatttacgtcaaaacgaaaggcaaaggagaaagggaaagatatacccaactgaatgcaaagttccaaataacaaggagagataagacagccttcttaaatgaacaatgcaaagaattagaggaaaataatagaatgggaaagattagagatttcttcaaaaaaattagagataccaagagaacatttcatgcaaagatgggctcaggaaagtacagaaacagtaagaacctaacagaaacagaagatattaagaagagggggcaacaatacacagaaaaaccataccaaaaaagtcataatgacccagatagccatgatggcgtggtcattcacctagagccagacatcctggaatggaagtcaaatgagctagtggaggtgatggaattccagctgagctatttcaaaccctgaaagatgatgctgtgaaagtgctgcactcaatatgccagcaaatttggaaaactcagcagtggccccaggactggaaaaggtcagttttcattctaatctcaaagaagggcaatgccaaagaatgctcaaactaacacacagtttcactcattttacatgctagctggcaaggtaatgatcaaaattcttcaacttaggcttcaacactacgtgatctgagaacttccagatgtaccagctgggtttagaaaaggcagaggaaccagagattgaattgccaacatccatcggatcatagaaaaagcaagggaattccaggaaaacatctacttctgctttattgacaacactaaagcctttgactgtgtggatcacaacaaactggaaaattcttacagaaatggaaataccacaccactttacctgctttctgagaagcctgtatgcaggtcagaaagcaacagttagaactggacatggaacaacggactggttcaaaattgggaaaggagtacatcaaggttgtgtattgtcatcctgcttatttaacttctacgcagagtacatcatgctaaacgctgagctggatgcatcacaagctggaatcaagatagctaggaaaaataccaacaacctgagaaatgcagacaccactctagtggcagaaagtgaagaggagctaaagagcctcctaatgaggtgaaagaggagagtggaaaagctggcttaaaactctacattcaaataactaagatcgtggtatctggtcccatcagttaatggcaaatagatggggaaacactggaaacagtggctgactttattttggggggctccaaaatcactgcagacaataactgcagccatgaaattaagatacttgctccctggaagaaaagttgtgacctagacagcatattaaaaagcagaggcattactttgtcaacaaaggtctgtctagtcatgaccagtggtcatgtatggatgtgagagttggactgtaaagaaagctgagcaccgaagaattgatgcttttgaactgtggtgttggagaagactctcgagagtcccttggactgcaaggagattcaaccagtccattctaaaggagatcagtcctgggtgttcattggaaggactgatgctgaagctgaaactccaatactttggccacctgatgggaagagctgattcattggaaaagaccctgatgctgggaaagattgaaggcaggaggaaaaggggacaacagaggatgagatggctggatggcatcaccaactcaatggacatgggtttgggtggactccgggagttggtgatggacagggaggcctgacgtgcttcagctcatggggtcgtaaagagttggacacgactgagtgactgaactgtactgaacctgatgcaaagagctgattgatgtgaaaattctatgattctgggaaaattttaaatcaggaagagaagagggcaacagaatgtgagttggttggatggcatcactgactcagtggccatgagtctgagtaaactccaggagatggtaaggacaggaaagcctggcatgctgcagtctgtggggtcacaaagagtcagacaggacttagcaactgaacagcaacaaatgtcagatagtcttctgcctgttttcctctaagagttttgtcgtgtctggccttacatttacgtctgtgatccattttgagtttgtttttgtgtatgatgttagggagtgttttaatttcattcttttacataatgctgaccagttttctcagcaccacttattgaagagacatatcttttcttcattgtatattcctgcctcctttgtcaaagatgaggtgaacacgggtgcctgagtttatctctggactttgcgtcctgttccatccatctgtatttctgtttttgtatgagtaccatactgtcttgattactgtatttatgtagtatagtctgaagtcagagagcctgattcctccagctccatttttctttctcaagattgctttggctatttgaaattatacaattttttgttctaattctgtggaaaattctgttggtgatgtgagagggattgcattgaatctgtagattgctttcaatagtatactggttttcacaatgttggttcttccagtccaagaatatggtccatttgtttgtgttgtctttgatttcttacatcggtatcatatagttttctgtgtacagatattttgcctccttagataggcttattcccaggtgttttattctttctgctgtagtggtaactggggttgtttccttaatttggctttcagaccttccattgcagcatataggcatgagagagaatctttcagacctttcattgcagcgtataggtgtgcgagaggtttccgtgcattggtttcgcattctactgctttgccagagtcgtcgtttaactccaggagtgttctggtggcaagtttaggattttctgtgtgcagcatcacatcatctgtggacagtgacagttttgcttcttcttttccaatatgcactctttttgtttccttttcttctctgatctctgtggcaaggacttccaaaactatgctgagtaagagtggcgagagtggggaatcgtgcctcagaggaaacgctttctgtttgtcaccgttgagaagggcgtttgctgtgggtttatggtttatagcttttattgtgttgaggtaggttccctctatgcccgctttctggagagcttttatcatgaatcagtgtttgattttgccgaaagcttttcctgaatctaatgagatgatgatatggctcttattcttacgtctgttagcatggtgcattatactgattgatttgcgtatattgaagaggacttgcaccctatctgaccatggtgtatggtcctcttaatgtgttgctgaattctgtgagctcgtacttcgctgaggatttttgcgtctgtattcatcagtgatactggcctgtaattttctatttttgtgatatctttgtctggttttagtatcacggtgatggtggcttcatagaatgagcttggaagtgttcctctccctgcaattttggaagagtttgagaaggatgatgttagctttctctaaatgtttgatagaattcacctatgaagccatctggttttggacttctgtttgttgaaagatttttaatcacactttcaatttcattgcttgtgattggtctgttcatattttctgtttcttcctggttcagtcttgaaaggttttacctttctaagaatttgcccatttcttccaagttgtccattttattggtatgctgctgctgctaagtcgcttcagtcacgtccacctctctgtgacccatagatggcaacccactaggctcccccgtccctgggattctccaggcaagaacactggagtgggttgccatttccttctccaatgcaggaacgtgaaagtgaaagtgaagtcgctcagtcatgtccgactcttagcagccccatggactgcagcctaccaggctcctccatccatgagattttccaggcaagaggactggagaggggtgccattgtcttctccgttattggtatgcagttgcttgtaatagtctcttatgatcctttgtatttctgaggtaacaattgtaacttctcccttttcattttctagttttattgatctgagtcctctccctctctttcttgaggtacctggccaaaggtttatcagtttttttcaatcttcccaaagaaacagtttttagtttcattgatcttaagaaaaaaagttttcctagaacaacttgtttttagtgaaccagacgggctgcttataataaattcaaccatttccaagtagttagtaaaaatatttatataaagcagcttatttaagtttggtttccacaattcctttgaaaaaaattggagtatttcgttatttccattattcagatatttgattctgtttccatttaacagaacaaaatgagtaacaaacaaaatcaacccaactagctgcagctttaaatacaactctaaagaacagttgaatcacagactgtttgaaattggaggaaaatctatgatgctgtcgctttaatcagatggaaatatgtagctttaagtgcttttattgggaaaaaaagaaaaatgattgaatggatggatgaaccaagcattcaacctttggggacagagatgaaaataactaaaaatcagtttaaaactcactcttgacaaaaatataagcaagcatctaacaaaatgttattacagaaggagtgaggtaaataaatattagatacttaatattagacttaaaaaataaacctctaggtaataaggaaataaatcagggtggtgtcaagatttggataccagaaaggaaagtttgtgagggatttttacagagacagtacttttaaaacaaaaaaggcttagagaactttcacagggttaatgagaaaagctcatgatcctggtagtaaggaggcattggagaacttaggagctctttcagtaaatggaatgcaggtacaaagctaggctgcaggagatcgagttggtaaaaagaggcagcaagagtcaccgtttccagttttccagaaattcaataaaaggggcccacccatgaagccaggtcaggttctggtacagtgttttgaaggattcatggatcttccaaaaaatgcctctgttgctgctgatttaacctgttgaagaagcttgtggatcagttttgaagcagtttctttacatggtactatttttaattatagtgtgtagtgaacaacagtactgaaattacatagaactaggcatgcattagatttgatattcactgtcttgttaactccaaagccctcttagccctctgtatacactggtctcatctttattccagtctagtccagtcctcactgtccatcagctctcttgacagctgcattaattttcattcacttagcacctgtgatttaatagccagtagtgcttattgcagattgcctagtacgtcttgggaagaaggttgctgctaatatttaagctctgtcttagccaactttctcataaacattgtcgtgcctgaaacacaatcagtggacagtgtgcttaacatgcgtgccctggaagtgccttggttaagattgtttctctctgaaaatacagacttaccttcactagttgttttctaaataaaatactcttctagaagctctgggtactggatgaggggaaattggttaaaaacaaaaactacacaaaaaaaggataacagtgctcatccccttttcagagctgttcagatgaaaaattgctcagcgtgagcttgatctatatgtttttcctggttattagtagtaatgaagatgcattaaccatagtctcttgataatgcgctagcagtttcttagtacttttatcaacatacaaattttagaactggcaatatgggaattcgactagtacatttttgtttataaaaaagggtaacaacattataacttcttcatatctgtgaattatgaatctcgactttcagacaagcgaaacgagaatgcagtggaacttcaggatcataatagctcttctttcctccaccactgaggagaggggaccgcacacaggctgccaagtgcagtgtcgtgccagaggcaaatgccgtctgagtccataatggatgagtgctttccatgtcgctcattccttttctcaataaacatgtcctgagtgcgttccctgttgcttagctgtaatgtctgtcaattgaaaggctttacttccttaagaagcagctgaaaattacaagtagtgcatcatcactatatatcattatctctattaggaaacattgttattcaacaatttttggaaggacattacatagctaggtgagtgatttctttgaagatgaaataatgcaaataaaccatttggaaaaggatttgtttttcagatttaactgtgttataaatgaatagttctttcttttataaagctgaattccaagcctcccatacctagcctgtaatattagctagaatcattggagaagattttatggaaagaagaagcatagagctctttgatttttactctagaaatctggatcagttatgttttagaactctgtctggcttatctattcagagatctatctagttcagttcagtcactcagtcgattccctgtccatcaccaactcccggagcttactcagactcctgtccatctaatcggtgatgccatccaacagtctcatctgctgttgcccccttctcctcctgccctcagtcttttccagcatcagggtcttgtccaatgattcagttcttcccatcaggaggccaaagtattggagtttcagtttcagcatcagtccttccagtgaatactcaggactgatctccttcagaatggactggttggatctccttgcagtccaagggactctcaagagtcttctccaacaccacacttcaaaagcatcaattctttggcgctcagctttttttatagtccgactcttacatccatacatgaccactggaaaaactgtagctttgattagatggacctttgttggcaaagtaatgtctctgcttttttatatgctgtctattttgatcatagcttttcttccaaggagtaaacgtctcttaatttcatggctgtggtcaccatctgcagtgattctggagccccaaaaatgaagtctctcactttttccactgtttccccatctatttcccatgaattgatgggaccggatgccatgatcttcattttctgaacgttgagttttaagtcaaccttttcactctcctcttccactttcatcaggaggctctttagttccttgctttctgccataagggtggtatcatcttgaatccagcttgtgcttcatccagcccagtgtttctcatgatgtactctgcatagaagttaaataagcagggtgacaatatacagccttggcgtactcctttcccaatttggaaccagtctgttgttccatgtccagttctaattgttgcttcttcacatgcatacagattctcgggagacaggtaaggtggtctggtattcccatctctctcagaattttccacagtttgttgtgatctacacagtcaaaggctttggcatagtcaataaaacagaaatagatgtttttctggaactctcttgctttttcaatgatccaacggatattggcaatttgatctctggttcctctggcttttctaaatccagcttgaacttctggaagatcatggttcacacactgttgaagcctggcttggacaattttgagcattactttgctagtgtgtgagatgagtgcaattgtgcggtagtgtgagcattctttggcattgcctttctttgggattggaatgaaaactgaccttttctgatcctgtggccactgctgagttttccaaatttgctggcatgtttgagtacagcactttcacagcatcgtcttttaggatttgaaatagctcaactggaattccatcacctccactaactttgtttgtagtgatgcttcctaaggcccacttgacttcacattccaggatgtctgggctctaggtgagtgatcacaccatcgtgattatctgagtcatgaagatcttttttatatagttcgtctgtgtattcttgctgcctcttcttaagatcttctgcttctgttaggtctgtaccctttctgtcctttattgtgcccatctttgcatgaaatgttcccttggtatctttaattttcttgaagagatctctagtctttcccattctattgttttcctctatttctttgcactgatcgctgaggaaggctttcttatctctccttgagattctttggaactctgctttcagatgggtatatctttccttttttcctttgcctttagcttcccttctcttctcagctatttgtaaggcgtcttcagaaaaccattttgcctttttgcatttctttttcttggggatgatcttgatccctgccttctgtacagtgtcatgaacctctgtccatagtccttcaggcactcttgtctatcaggtctaatcccttgaacctgtttgtcacttccactgtataattataagggatttgatttaggtcataccaggatagtgtagtgattttcgctactttcttcaagtctgaatttggcaataaggagttcgtgatctgagccacagctcctggtcttgcttttgcttctgcagggtgacaatatacagccttggaagagggttgttggaagagggtgtttgctatgaccagtgcattctcttggcaaaactctatgagcctttgccctgcttcattctgtactccaaggccaaacttactccacgtatctcttgacttcctacttttacatcccagtcccctataatgaaaaggacatcttttctggatgttagttctagaaggtcttgtaggtcttcatagaaccgttcagcttctccagcattactggttggggcatagacttggattaccgtgataaagaatggtttgccttggaaatgaacagagatcattctgttgtttttgagattgcacccaagtactgcatttcagactcttttgttgaccatgatggctactccatttcttctgagggattcttgcccacagtagtagatataatggtcatctgagttaaattcacccattccagtccattttagttcactaattcctcaaatgttgatgctcacttttgccgtctcctgtttgaccacttccagtttgccttgattcatggacctaacattccaggttcctatgcaatattgttctttacagctttttgctctactgagagctctgtctacaagatcccgatgctgggaaagattgagggcaaggcaggaggcggaggtggtaacaggatgagatggttagatagcatcgcgaactcaatggaaatgagtctgagcaaactctgggagacagtagaggacagggaagcctggcgcactgcagtcaaggggccacaaagggtcagacaccactcagcgactgaacagcagctagtaatggcaaggatacagctggcgcataaaacgtgggagaatcaccttgtacctgctgccagacagacctgagaaaaggaagtgatggcaaaatttaaggtgacgaaaatcaggacaagtggatctctcagatttggtttccagtttcctactcttgtgaaaacaaagctaaatgtgagaaaataagcttctattaatgattggattacatactgatattgattgacacagacaacatcccacaagtaaaatagtctaactggtcctccagataatagacccgagatacttaaagccagtgactcacttgggaagtaatcattcattttaacagctgttgacttggtgtcctttctctgccaggctgagcatcggcgctggcaaaccccggtcgccaggagaggcctgtgtgagtgggaggggagcgtggaggggggcccttgggccctgcagcgcagtcactgtgacctcaggggtgggctgggagcaggggagcacagccagaccgagcgggccgggctgcagcgcagaaagctcactgagacgctttgtgaggagggcgagaccaggaaggaatgagcgttcagaggagggctgcaaacgtgtgtgcacccgagtgcacgcgcagcaggtggtgtgctcatgggagacacgcagagaggagagcacgcgaggcgggccggggctctgggagcagccgtctccagagggccgagccgctgggagcctgcctgtgggcggcgagccgggccggggcccaggtgagaaggatgtgtctgccttttagcaaggataggcagaacacctggtatgtgctggcaacggcgggatggagacagcgtccttgtctccaaggcattttgttgcactggggagtggagagggcagacacaccgggcagaccaggaaaacacgtggtgtgtcgggaaaaggaagcagggccgcaggaggcgggtgtggaggtggggcggcggggagggcagacccgtgatggactctgtgggctggctgcatggctgtcagagacgctgctgtttcagaaccggggaagatgcggccttgggggagacctgttctcccctcactccccttggcggccaccccgggcttgcccagccctgaccgccccttcggagcccgcctcgcaggcttccgtcaccacctacttccacggcagcggaaggagtgtacttcttgcctggactccccagcaggggagctgtgtttcagacaggggcggcgttggcactgttaggccctgttgaataaaggaatgaaaaattccacaagccgcatcttcagaagtcttgcagttggattgtcctgtggtcacttttaagcttccatacctcactctgtgtacctgatctcgtaaatggcccttttcaaagcatgtaagctatgtctttgtatcaacagaatatgtgatattctgatattagagaacagagttctctaatttaagtaatgtgtctccacattttttttttacaggaccaatgccaaaggcgctcccctaaatataaataaggtctcgaacagcttgattaacttcggaaggaagctgatttctcccgcagcggccccaggcggtgcgggaggccccgtggcagtgggcagtggcggcaccccctccccggcggcggctcccaccaggaccttggcggaggcccccaggcacgctctgcagcagcagcagcagaggctgatgaaatcggaaagtatgcccgtgcagctaaacaaaggtaagggaggatgctagaacctgggccttcctcacctgacttcgaggaaccaccatcctagaacgagggactaatgcaaaacccaactgtaaaacatgttagattgtttttaagtgggaatttcagatactgtactgttcttaagaactttttacgagctaatttgttaaagtactttcttaacatttctgcctcagtgtgcttgcatttgagtcgtggtcacgcccaccgagcgtggtgtgaatagcagagagcttgtcacagcagagagcttgaggctgtagaccaaggtgtctgccaactttgtgcagtgatgcctctggctaggagagcgttggcaaggggcggcctgggaccctgggctctgccggtcccagcttttacccctgcggttggtttggaggaggcaagtcaccaggcttgcgtcccatcgaggagcacaaagcagagccccgaatgggggacggggcaggcaggatgcctcgcgcagccagggcctgtgtccgcgtcagggcaccgggagaggcggagagcgtgagaccggctcttggtgtgcgtggccccggggctgtgccggcgctggggctcggggaggcgccctccccttcaggggcttcccagcacttcacctcactcattgtgttcataagagagcctttcaggttcctacccagaactttttctcatattttccacttacctccaaagatgtgtgaatcaaggcagttagaaacagctacatttattcttagctgtgggctctgctgtctgtattccggaagcatgagatactaacatgatggcagaaaatctacagaaatcaatcctgaggcctcacaaagcctggagtctgtggctatttagtgtcagagcagatgccctcttgacccctgcctcatccatatcgtaaaggaatcatagcctggatcatagccaagttcagtacccaacactcagtgttgacaataacaataatatattgaattgttaaatattaacccatgttccatatactctgtttaagacgattgcatccaacgttaccaaaattttaattactggtatttaaactggtaaacttaagttaaatagactctatatgccaataacagaaaacaaactgtgtgtgttcaacaatcatcagtgtgcttctattagttacatttatctgtcattgcctatatgaagtattagactatataatggctgtttaaatttctattataatattccatttaccttacataggaacatcttttaatattattacactcttctctctttaatgcagagctatcacacgtgatttaaagagaaggagactgcaaatccataaatgtattttaatgccaggagacatgcccacttccaggatggaaatgaatgttattttatatatttcttaattgtactgttttattgttctaaacaaatatgatttcaatattgctttgataacaagccatagttagtagtaattctaactgatggcaggcaaatgagtcagagaatctcttaatgccgtagcttaaattttctgaggaaccaagccaaatgacgatagaaatataaagttgtgtctctaaggaaatgtcaagtattaatatcacagtgagtgagaaaggaagtacatgaggactgaacaattgatgaaaactaagtcccgagttagaaggaagcaacagagcacttaagcagagcatttggaacaggagcgtcgctggggcattccgtgaccggtccctgtgcaaaacggaagcgatcttgtttggcagctcttcgtttcatttctggtttattcttctcacgccaacctacagaaagcttctctaccttcatattaaagatgctcggtctgtcggggcccctccctgaacaaaggttttaataaaataggccaaaaggtgaagagagcagtttgtactggtagaaatggggtaggttgatccttcacttgctctccagtgaaccacaggcagaatccggaaactttctgacccttttccccatccggaaataaggggtttgacctgacccctggggagcatgccagctctgcacacctgtggttccttagatgaaaggtgtgtttgttaactctcctccagtggcggttctttctgtgggcgtttcccgccagtgtcctgccgcgccccgatgctgacctgaacctgctgtgtcccctggcccagaagggttgagcacagtgctgactccttcccaagacccacgctgggacagggcttctgactgtctcggaacagccctgtgcttcatgcctttttaaagtgcactctgtaggaaaacttgaaccttgtttcgaaaagcggttgtttatgcagctgaaaacccttaaggataacccttatgggttagttaactctcaattatctctgctcatatagaggaagagttctgtgagaaagccagcattcaaatatctgttatttgaagtgcattctgccgtgagtatctgtgttgggggtggagtcctgaaggaaggagggagtgcagatggtcctccaccattttccaggtgacatcagtattaaacttagcttcagtctctaaatatacattaataggtgatccagaagctgccgagtaaaacgagtagcaagtgtaaacttgaaaatcttcgagtgtacagaacgtgaggcacactgcttatcagtgaatagagacttaactggattaggaaaactcaggacctgggaagttccactaaaagttgtttatcagttatttggagtatgtacctatttacagattttatttcagctatgggagaatataaatgcatgtactgttaattgataggaatggtctaattacaacccagtaatttccagatgagctgtctgtgctgtaaatcatcattgtagccagtggtcaaggcactgaaagttgttatataattcaaaatttgatttttttttttttgctaatgtataggagctacagggaaagcagatatgttaattatgtgttaccatacatagaaaatgtggtgccttttaagaaggcttgtttttcagcttgttagtctcaaaatagcacaaggcttcagatgctgacctgtccaggagagggttcggttgacagtggctgtacttcatggtgagctttgtcatccaggaaggaaatcagagacccccacaaaccttgcttctcagtggccctggaccccaggtgcttcccggcacctccttttccttgctctcccgtgtcctgaaaacgcactccctgacccccttttccttgtatgcttttttagtttgagcacttctttattttaagcatttactacaggtccaatttgtaaatgaaatcttgcctatagtaagtatatcaagtttaaagggtatgcagttcacagatttatttttacatgttgacatttataagtgcatgtggtaacttatgaaatcttttcagtacttaatatgaaatcagaacttgtctaggtctttatcttatcactgaagaaattggtttcaagtttcgttaaaaataaattttgtctgttacaggaggaaatcaatttcaaaggaacatctctacttcttaattaaatacatagatacttttggataaagaattttttaaataagaaaatgtaaaatcatgctgttatttgtaggacaatgaaatctgctcagcagtatccattgatggctagtttcctgtactttagacctgtagaaactttttttttctcaagaaaaacaggcacaaacttttaaggaaacaccttaaaaattagttccttcaagaaatactttatagtaattattctaagattgtgttatagtttgattcactgtacttttaggaattaggttgataggtaaaagtattatagcgttaactctgaaagaaaagctaattttttcctctttatgaaacctaattattttttcttatgaaatccaggcaatgtagttacaggaagcgatgctcaggtttctgttcctgtccagaccctaactcgcctcccaggtacagttaccatggcaacgcaggatctcctggcctgcagtctcattgcctcctcccaaactccgttttcctttttgccacccaccattcacgctgtttgccagctcgctccattgttcaaccgctgagtggcactgttgtttaggacaaaagtcccctctcccgtcataccttgctagcaccaaagctgactgcagtctggtttttaatatttctttaactgagtttgtaccagtctctttccttgcaatatgcagcactctagattctgtggttcttttaacaccacattgtaactgacagttcatgctgaggtgttttcccgttgacgaggtgctctgtgataggatttgacagattagcgctgaggttaaacacctcagatgctgtgtatctgcttattattgtatgtattagccagaagtacttattatattttacagagaagaattacaacttgatttcaaaatttgtttctaagtacaggctttgtattatgagtcattttaacagaattagaattcagcgtgacaaatctctatgtacagtaattggtgatgatttaaaataaaaagacagtatttaaatatcataaccatgtgtccaaaatctagaaaaagtttatttacgaaatataaaacaatagtaatccatattcagcacctcctatggaatttagacacatatatatttaaagttgctgcatttatcttttattacaaaatcttttaaaatattctgtagagagaaagtctgtattaaatggaaggctagactaactttaagaatcctcccttcaaattcagactaaaaagaggacagtattaatagaaattcataaatgtcttccttagtttaaaatatatgcacagtagtcatgctgctagcattaaactgctgttctaataatgacatgtctctgtaatatctgtgctttttaatagcgtaacagaaaataatacgtcatggttaggacatgagtggtgtgttgacttaacgtgttaaacataccgtgggacagaggggtgtgatcttgcttctgtatatagttctgcgtttccctggtagggtttctggctgtgttctggtaattgacccgctgacctttaggcttttggagctctcagagtctgtgaaagctgccatttactctgttcagtgacctaagtaataacgggctgctgtggcgttgccggtacaggaggcagatcagcgactcctctttccccttgtcagttattgcacctacgtgaatgttgatgagattttctgacctggtgagaagtcacaggacttaaatttgtttccttaaaagttttttttttttttttttggctgtaccacacaacttgtgggatcttagtttcttgaccagggattgcacctgggcccacggcagtgaaaagcacgaagtcctaaccactggactgccagggagtttgccccaggcagatgtttaacaggcgttctgttgcggcagggttagtttgctgcagagtgtatctctggctgcgaaagcctgatgggtttatacctgtgtggaaagagaaagctaaaggctgcttcctgttctgacttctgcttctacgctcctgctcaatccatgttttccagtagacacgtgaacagcgtccctttttaaacagactcttaaagaaggcaatggcagcgttttgttcagatgacttgcattagagaggtgggatcgcctccctccctcactgagcacgtgccggaagcctgcagtgcgcccttagagaggtgggatcgcctccctccctcacccagcaagcacgtgctggatgcctgcagtgtgcccttaagagaggtgggattgcctccctccctcacccagcaggcacgtgctggatgcctgcattgtgcccttagagaggtggcatcacctccctccctcactcactccctgagcactgctgcctacagtgcaccaggctctgtcttcaccagtcccttggcctccctcctgcttcgccaagctgcatgggcatcaccggtacttcagatgactcgggcaagtccacctggtcaagagccagctctttttctgagcccctgttccctactgccctgtctgccctgcccagcagaactgtatcagtctcacagggaagggtccagcggcttaatgagacaggaggccagatgaacagctttcccctgcagtggacagtggggcgagccctgccccagtttggagaggtcactgtgggtttgcctcaacccagcacacttcctacagagtgtcagagagcaaggggaggtagaagggacccaaaatagttagtggtggcaacagaaagctttctagcaatctctgctggagagattcttgaggctcagtaatcccagatgttggagaagctcatcagaggttccagacccacaagaatagacacacttttcagggagataaaatatcatgtagactttcctgggtgtcttttttcagagtggtggagcagatttcaagaaatgaagcaaatatcagtatttgcaataattctttaattgtaggtagtcttttcttatcatgaggtcttacatctgtatctttgccttttaacacacaataattatatgggttttaattttttgaagaacattacaaatataaagtgatatctcacaatccaggccattaaataatttttggaaaattgttggaaagatccgttttctcagtgtaggttgtaatcataaaagacatgccacaggagagtttattcttttgtcaacttaactcaaagagttttcttcaaaattatctttagaaatagcacatatgcccccaggaactttttttgagagatacttaggaattattaattcataaacttaaaattcagaaaactaagatcatggcattcagtcctatccacttcatgggaaatagatggggaaacagtggaaacagtgacagactttattgtttgggctccaaaatcactgcagaccgtgactgcagtcatgaaattataaaagacgcttactccctgaaaggaaagttatgaccaacctagatagcatattgaaaagcagagacattactttgccaactaaggtccatctagtcgaggctatggtttttcctgtggtcatgtatgaatgtgagagttggactgtgaagaaggctgagtgacgaagaattgatgcttttgaactgtggtgttggagaagactcttgagagtcccttggacttcaaggagatccaaccagtccattctgaaggagatcagccctgggtgttctttggagggaatgatgctaaagctgaaactccagtactttggccacctcatgcgaagagttgactcattggaaaagactttgatgctgggagagattgggggcaggaggagaaggggatgacccaggatgagatggctggatggcatcactgactcgatggacgtgagtctgagtgaactccgggagttggtgatggacagggaggcctggcgtgctgcgattcatggggtcgcaaagagtcggacacgactgagcgactgaactgaactgaactgaaacttaaaatataaggacacagacatacatagacattacttcctaagggaaattataatttctaacaactgcagtatataaatattatcatataatggacccttaggaaagaaatttgtatttcttaagttagtggcacacacaggcatttttaaaatttgtgtctgtgtctattcatgtttcagatatgagtgaatatgcataaatgtatatgcatagatgtcactatgcatatgatcaggtttttcccttttccgttgtggcttatcacagcatattgaatatagctccctgtgctgtacagtagcaccttgtttatccaccctatagataatagtttgcctctgctcatctcaagctcacaatccatccctcccctgcaccccagcgctgcagccacaatcttgttctctgtatctgtgttgtagataacttcatttgtgtcatatctgagatgccacatgtaagcaatgtcatatgatgtttttctttttatttctgacttagtttgcttggacttccctggtggctcagacagtaaaagcgtctgcctacagtgcaggagacctgggttcaatccctgggttgggaagatcccctggagaaggaaatggcagcccactccagtattgttgcctgtaaaatcccatggacagaggagcctggcaggctgcagtccacggagtcgcaaagagtcggacaggactgagcgccttcactttacttagtttgcgaatctgtaggtccatccatgttgctgcaaacggcattatttcattccttttatggcagatgtcaccatcttagttttttgaatgctgagttttacaccagctttttcattcttctcttgcacctacatcaaaatgctcttcagttcctctttgctttccgccataagggtggtgtcatctgcatatctgaggttattgatatttctcccaacaatcttgattccagcttgtgtttcatccagcccagcgtttctcatgatgtactctgcatagaagttaaataagcagggtgacaatatacagccttgacgtactcctttcccaatttgaaaaccaatttgtggttccatgtccagttttaactgttgcttcctgacatgcatacagatatctcaggacgcaggtcaggtggtctggtattcccatctctttcagaattttccacagtttgttctgatcgacacagtcaaaggctttggtgtggtcaataaagcagaaatagatgtttttctggaactctcgtgctttttttatgctctgacagatgttggcagtttgaactctggtttcctctggcgtttctaaatccagcttgaacatccggaagttcatggttcacatactgttgaagcctggcttggagaattttgagcattacttggttagcatgtgagatgagtgcaattgtgtggtagtttgagcattctttggcattgcctttctttgggattggaatgaaaactgaccttttccagtcctgtggccactgctgagttttccaaatttgctggcatattgagggcagcactttcacagcatcgtcttttaggatttgaaacagctccactgggattccatcacctccactagctttgttcgtagtgatgcttcctaaggccgccttgacttcgcattccaggatgtctggctctaggtgagtgaccgcaccgtcgtggctatctgggtcattccactgtatgtatgtatcacatccgccttatccattcatccgtggatggacattttaggttgtttccatgtcttggctattgtaaatagtgctgctgtgaacataggggtttgtttgtttgtttgtttaatagaaaaaggttgaaaaggataaaagtctcccttcccacttaaccactgttgatgtaaaactaaagcgcatgtaacattagacagtcccagttaactaaagggaaaaaagagaaaaaacagctcctttttctcctcctacttccttttgccagcccatttcactacaggtatccattgttaagtttcttataactccttctaggacaaagaaaaaatattttaaactaaggggtaacaggtacctcacgttaatatgctaacacctcgtgtctggagatgacttcactgtgaagcttcaagatgaaagcaaagtctgtgcagtgcaggtgacaagcagtaagtggctgggacagagaagagggaggccagatcagctcgggcaggacatagtgcgacaggacagagagcctgctcctgcccgcagggagggctgcaaagcctcaaggctgtcctggaagatggccacgtagcagtccctgtgcgtgctgttggaaaacgagagtcccgaagcagaacaagcagttccgttgccttctaaataatcgctttaagaagacagaggaatacagactatgtaaaacaaattaaggacactcatcagttaactagaacacgcctcgttttggggaagacttactccaaaagacattgaatgaatgagttgttggatagagaacaaggtcagagttggccctttgccatgagaaggtctcattccacgttcctttcacctgaaggcgcgttttctacagccctttctcagggagcagggcggtgagtctgtgctcagcataggccctggagtcagggctgaggtggagtcctgccccagtcagtgccttgctggatgccccatggaggctgctggacctctcatctgtagagagagcagggacagctgcttcggggtggcggcacctccacgcctgtccaccgcaaggactggagggtgccgcctctcatctgtagagagagcagggacagctgcttcggggtggggacggcacccccacgcctgtccactgcaaggactggagggtgccgcctctcatctgtagagagagcagggacagctgcttcggggtgggggcggcacccccacgcctgtccgctgcaaggactggagggtgccgcctgctgggggcggttgtgttggcggggtcattatgtacctcaagtgcctctttgggcgtcagagtcagccgtgtgaagcaaacaacgcaatgcctctgtcttgtcttaatcacgtgtcctgacggtctgaacccccacgtttgcactttcacacgccagccctggatgaggccgcgcccggcgtctctggtcaggctagaaccgggttggttgcaggcactgcaggccctttgccctcttgcggcaccaacgtgtgtttttcaggagcagaccagagccctcttgctgtctgtcgctcaggcctgtgaggtcatactctgtcaccaggaggggaccagttgcatcctgtgtgctccagggccaccgtgtgacgtccaggcgaccccctttctgtgaccgttgtgctgggcttcctggaggccttgcccttcccgatcctctgagccagggttcccaccagcgacccctagaattcccagcctcctgaatgtgttgccttggggtgtcctgtgtccaaatccccagctggtctcaggttcacggggttcttcccggccattcaggagtaccgctcatcccgtgtccttgtttcctgttgagtttagtgagagaaagttcacgagaatatcacgcatggggcatcgtaggagcttcacctgcgtcccctccctcctctcctctccccagccagcctgcagtccgggtccccgctgatgccggagcagctccttcagtgaactcggctcttgacagataagctccatcaacacgtagcccgtgggacccagaacatttattgaacgtttcagagcggcctgcgctcggagcccgttagcccaggtctgtgggcgtcccctgagcaggtggccgtgggcccgtccaggagagtgccccaggtctgtgggcgccccgagcagggcggccgtgggcctatccaggagagcggccaggtctgaggctggaggatggtcgaggcctgtccaggagagcgcccaggtctgaggctggagggtggcccgtgcccacctgtgctgggttgggggtgcccagtgcgctgtgaatggtctgcgtgtgctgagtccatcgcagatgttcggaccatgctaagcccttcccacgtgtccaccgtgggcacccagcacatgtgaagggctcgcctccccaggggggagactgtggcctatggagggtcagggacttgagggccccacggctagacagcagcggagtcagactggaccccagctgtgtccggctcagcaggtgtggatctgagggattctgcttggcaagccgctcgtgcatcgcccacaaccgccccagctttagctgaagccctgagatctctcgggggcccagcgcaggaggcgcctcgtccagcccagctccggtcatcctgagaccacgtccctgcctccagcctgcagtcccgcagggctgctgaccagagcagccaggcccctgcctgaggacacactctgctgggcccagcgggcctgtcctcaccccgccgtccctccctccctccctgccccagagccgggtgaccgggaggacagagcccacactgagggtgccagcagcttctgaaaggaatgtgtgtgcccccgtccccccggcctgcgcccctcctccccagcacagccagtgagatcgctgtcaggggagagaccgccctgccctgcgctgctcgtgcgggtggcggtgctcctttcagtgccacgcggatggcagggagccccgaggggtcgaccaggctttgtctcatcaaggtgtgcccagtagtctgcctccgaaatactctttcctgcagaaaactgaccttccctgaaccaccacccgccctcttcagatgtagctccgatctgacggcctgagacagggtcgggtggtccctcctctgagctttcgttggctggggtcggaggttagtcggtgtgtgtgcaaggcctcgtctctcctgagctggtgtttcagaagctccttacgagctcctgtggggccgtcctcggggccgacagactttctagacacatttcctaccgtcagcccacgtagggcttgttccccgacgtttgaaggaaagactgtgcatgcctgctgtggcttgaggatatttagtatattcaagagtgacttaccgtgtaattatgaaaagccattctgggtcaggacttcagaccttcgtaggacgcttctgggggagtgccctaaggagcaccctgaatccatgaggagtcaaagcagcagccttgagctgcgggagggggtgaactccgtgctgttgctgctgggacccctgaggccaggacagcgctcagaggccgtcgtgagaggggaccagcccgggcctctgttggcccaaaccagccccgggtgcagctgtccgcagggaaggggcgtgctcttgatagagcagttcttttcagctgggactgtctgcagagaggaagccacaggggccgtcggcatctgagagaaagcgtgcctcagtgccgctggagtcctgcccagctctgcgtggtgaacagtgtgcctccaggcgtgagcatcaggccccggcgcccgcggacatggagtgagcctcaggccccggcacccacccatggcccggcgcgcccacgcacgtggagcaagtgtcaggccccggcgcacccgtggacaagcatcggtcctgtcaagacaccgtgcagcttatgggttgcaggcctgttgacccggactcggccgggatctgtcctgcggggcctggctggagaaacatctcatccatccaccagacgttgtcctgagcctgtgtgctagcccttgaaagggcagagaggctgaaggcccttccttctgtctcacgtgctggtgactccagcttcttgaggtctaagtgtttccgttctcacagggcccagaaatgttagccagtttctgtaacagaggagaaacgtattttagtacacagtttttatatgcgatacacgccacatggtactgtattaatactaccaccaatttggaatttgttcattctgagataaattctgaaaagagctgacttaatgttatctctgaaaagatagttggccaggcagaataaaagctacaaaagaaactcatggagaacagaactttcaggtcctctctgcactggataactggatacatattctcacacagtaaatgactgataagctgatttgttaaagcaggtattcaaaagattttgcctagatatgttatcatcttgttttgttacgatggttattttatgtaacagtctacatgtgaaaaaatttggaagtttagactgttaggtggattatacctgtgctgtccagggtggtgtctgtttgctacactgggccttggagcactgcaacaagcatgcactgggttttcaaggcttcgtttcaagaaatgagtgtgaactatcgtggttctattttgatgatgtgttggaatgatcatagtttggatgtttggtgaagtaaaatatttatttaaattaattttacttgtctttagcgtttaaccatggatacgagaaaattaaatcggcacaggtggcctgcgtgctgtctgtcgagcagcggcagttcagtcagtcccctgcaggtcttccatgcggaacatcagcagaggttgactgtcaccccgccatgtaccacccaacaggagaagctgtgacgggcacagcccctgcccttcctgaaatctggtctgtaatatcagcagcagcgctctaactgaatacaagagacctgaccatccatctgtgtttccaggaaaaagcatttcaaagtgtgtgtgtatcctaacaattgagtagacaggcctcagcctctccccagatcgaatcgctccttagcgtcaccctctctgatacagaagtgcagtaacgtgttggtttagtccttaagtttggacaaaccgtatgatactgctagctatatatataaacactgtttcctgggcatagacttgattaaactctgtaagcctcagttttctcataatgtcattagtatcaaatgttatagcgtgtaaaggtccatacatgtccgtggactaagcttttgtaaacatcactttgctgaggggtattttaattttctgatttcttctttgggtcaccagactaaggaagtatgcatatagtaaaggttcaggaatggtagatggctataggacagataaaatctaaaatccgagttttcttgattttattataatttcaacgtggaaacagttgatttctatagtagggatcacgtcttaagattttttcccttgataacgtgtgtgtgtctgtgtgtgtgtgtgtgtgcacacacatgcactcatcgtgtctgactttttgccaccccgtagattgtagctgccaggcttctctgtccatggagttttccaggcaggaatactgcagtgggttaccatctcctcctccaggggatcttcccgacccggggtttgaacctgcttccctaccatctatcctgcattggcagactggttctttaccactgcgccacctgggaagcccattaatgttggcaatttcttttaaatagaaaaatttcccaacagctttgatggaactttactttatattataaatgcctaacagagataccccctaccttattttcagatagtaatcaaaaaaactaaaattttataagattttatatatataattgcttacaactatgttttttttttcatattgaaagataaattgggaggagggagttgttgtagtccacaaaattgtaagtcttcagttcagttcagttcagtcgctcagtcgtgtccgactctttgcgaccccatgaatcccagcacgccaggcctcgctgtccatcaccatcgcccagagttcactcagactcacgtccatcgagttggtgatgccatccagccatctcatcctcggtcgtccccttctcctcctgcccccaatccctcccagcatcagagtcttttccaatgagtcaactgttcccatgaggtggccaaagtactggagcttcagctttagcatcattccttccaaagaaatcccagggttgatctccttcagaatggactggttggaactccttgcagtccaagggactctcaagaatcttctccaacaccacagttcaaaagcatcaattcttcggcgctcagccttcttcacagtccaactctcacatccatacatgaccacaggaaaaaccatagccttgactagatggaccttagtcgggaaagtaatgtctctgcttttgaatatactatctaagttggtcataacttttcttccaaggagtaagcgtcttaatttcatggctgcagtcaccatctgcagtgattttggagcccaaaaaataaagtctgacactgtttccactgtttccccatctatttcccatgaagtgatgggaccggatgccatgatcttcgttttctgaatgttgagttttaagccaacttttttactctcctctttcactttcatcaagaggctttttagttcctcttcactttctgccataagggtggtatcatctgcatatctgaggttattgatatttctcccggcaatcttgattccagcttgtgtttcttccagtccatcgtttctaatgatgtactctgcatagaagttaaataagcagggtgacaatatacagccttgacgtactccttttcctatttggaaccagtctgttgttccatgtccagttctaactgttgcttcttgacctgtatacagatttctcaagaggcaggttaggtggtctgatattcccatctctttcagaattttccaaagtttattgtgatccacacagtcaaaggctttggcatagtcaataaagcagaaatagatgtttttctggaactctcttgctttttccatgctctagcggatgttggcaatttgatctctggttcctctgccttttctaaaaccagcttgaacatcagggagttcatggttcacgtattgctgaagcctggcttggagaattttgagcattactttactagcgtgtgagatgagtgcaattgtgcggtagtttgagcattctttggcattgcctttgtttgggattggaatgaaaactgaccttttctagtcctgtcgccactgctgagttttccaaacttgctggcatattgagtgcagcactttcacagcatcatctttcaggatttgaaatagctcaactgaaattccatcactagctttgttcatagtgatgctttctaaggcccacttgacttcacattccaagatgtctggctctagattagtgatcacatcatcatgataatctgggtcgtgaagatcttttttgtacagttcttctgtgtattcttgccacctcttcttaatatcttctgcttctgttaggtccagaccatttctgtcctttatcgagcccatctttgcatgaaatgttcccttggttatctctaattttcttgaagagatctctagtctttcccattctgttcttttccttgatttctttgcattgatcgctgaagaaggctttcttatctcttcttgctattctttggaactccgcattcagatgcttatatctccttttctcctttgcttttcacctctcttcttttcacagctatttgtaaggcctccccagacagccattttgcttttttgcatttcttttccatggggagggtcttgatccctgtctcctatacaatgtcacgaacctcattccatagttcatcaggcactctatcagatctagacccttcaatctatttctcacttccactgtataatcataagggatttgatttaggttatacctgaatggtctagcggttttccctactttcttcaatttgagtctgaatttggcaataaggagttcatgatctgagccacagtcagctcccaggcttgtttttgttgactgtatagagcttctccatctttggctgcaaagaatataatcaatctgattccggtgttgaccatctggtgatgtccatgtgtagagtcttctcttgtgttgttggaagagggtgtttgctatgaccagtgcattttcttggcaaaactctattagtctttgccctgcttcattcctcattccaaggccaaatttgcctgttaccccaggtgtttcttgacttcctacttttgcattccagtcccctataatgaaaaggacatcttttttggatgttagttctaaaagatcttgtaggtcttcatagaactgttcaacttcagtttcttcagtgttagtggttggggcatagacttggatcactgtgacactgaatggtttgccttggagacgaacacagatcattctgtcgtttttgagattgcatccaagtactgcatttcggactcttttgttgaccatgatggctactccgtttcttctgagggattcctgcccacagtagtatatataataaaatttaaatgaatctacctggtattttagagtaatttagaatctgagctatcatgtcaaatgatgaaattgtacagatcattgttactgttcagtctctcagtcgtgtccacatctttttgaccccatggactgcaggacaccacgcttccctgtccttcaccatctcccagacttggctcaaactcatgtccactgagtcagtgatgccattcaaccatctcatcctctatcgtccccttctcctcctgccttcaatctttcccagcatcagggtcttttccaatgagtcagctcttcacatcaggtggccagagtattggagcttcagcttcagcatcagtccttccagtgactattcaggactgatctcctttaggatggactggttggatctccttgcagtccaaggcactctcgagagtcttttccaacaccacagttcaaaagcatcatttctttggtgttcagccttctttatggtccaactctcacatctgtacatgactattgaaaaggcatagccttgactacatggatctttgttggcaaagtaatgtctctgctttttaacacgttgtctaggtggatcataacttttattccaaggagcaagcgtattttaattttgcggcttcagtcaccatctgcagtgattttggagccccccaaaataaagtcaaccactgtgtccattatttccccatctatttgccatgaagtgatgggaccagatgccatgatcttcgttttctgaatgttgagctttaagccaacttttttgctctcctcttttactttcatcaagaggctctttagttcttcttcactttctgccataagggtggtgtcacctgcatatctgaggttattgatatttctcccggcaatcttgattccagcttgtgcttcttccagcccagcgtttctcattatgtactctgcatataagttaaataagcaggttgacagtatacagccttgacatactcctttcccaatttggaaccagtttattgttccatgtccagttctaagtgttgtttcttgacctgcatacaggtttcacaggaggcaggtaagatggtctggtattcccatctctttcagaattttccacagtttgttgtgatacacacactcaaaagctttagcctagtcagtgaagcagaaacagatgtttcctgaaattctcctgctttatctgtaagccagcggatgttggcaatttggtctctggttcctcgccatctaaagatggttcctctgccatctagagatcataagtagagtataatttaaaaaaaaaaaaagaagaagaagaagaagaaggagtaataatgagaatttcccacttatttaacaactctggagatgagaggtctgacttaggtctcgccaagcgaaagccgaggtatcgtgaggcctttcggggagaaccgtctgtgctgtcggcagtgttcagttcctcgtgactgtagagccggggccccgttcctccactggctgtcagcagagggccattcgcagtctcgagggtcctcactgcctcgcttccctttctccgtcttcacagccagcaccgcaggccagcgctctgtctgtcttcagctgcctcgttctctggagtcatatctccaacccttcttctgctttcctgtctcactttaaggacccctgtctacactaacccaccatggccacccaggacactcttctcagctcaggttctgaaatcacgcctacagcattgcttctgccctgtaaaccagcacacttacagagcctaggcatgaagggcataggctttatcccacctgccatggctttgcggtgaagacatgaattctcaaatttgacccaggaagaagtaggaaacttttaatggaggaattaacgtagaaaaacgtctaaaagagccgttatagtaataacttcaaaaagtcaccagcactagcaaatgttataggtgaatgacccaaaatttgaagggatggataaatttggttgtataaacttaggaaaagataggaagtttttcatttcattttgtgaaaaagacatcttcttgtgaatcaaaatgctttggttagtttcttagattcctttttgtctgtggacttttagaagtaatttgaaactcaaagctgaacaaacattccttctgttttagctttatcttccaccaccccaaggcaataaaagcttctcaaggagtgcagttccaaggaacaaagagaaaataatcataaaaggaaaaagaaaagcctaggtttatagcacaggcttaaattgcttcccactttatcatcttggataagaaatgccttccttgcaggaccctgaaaacagaagccaaaaagagaacatagacacacacacacaaaggggctgtgttccagaatttaggaagagctccattaagacagtttttcaagataaaactaacaaagacaattcacataggaccttcagatggcctatattaatatgttgagagttttttttttaagatattcaccctcactagttattaagaaaccttaactaacataatgaagccttccttccatcagattaaccaaataaataaaaatttaatgcgtcacattacttttttgcttgctgctgctactgctgctaagtcgcttcagtcgtgtccaactctgtgggaccccatggactgcagcctaccaggctcctccgtccgtgggattttccaggcaagagtactggagtggggtgacatcgccttctcctagttttacacttaggtataaacatatattaaacacgtatgtttatgttaaaatcctgtgtgtgtgtgtattgatcgctccgtcgtggactctttgtgagtccatggactgtagcccaccaggctcctctggagtgggttgccgtgcccttctccaggggatcttcaggacccagggactgaactcaggtctcctgcgttgcgggcagattctttatcatttgagctctccgggaagcccatgttaaaaccctaggagaaagcaatttggagccatttatctaaattagactgtacatgccattagacatagcagttgtacacatataaatttatcttatagaaataattatctctacctaaagatgcacctctctagagtgttgtcattttgtttgcaaaggtggaaaattagaaaaatgctaagtatttgggaacactaattttttctcttcacattccttaaaaagggtaaggctgatttttatacaaatcaaaggtaagtttttatgaccaagtaagtccaaaaagtaagttacagaggagtggacttttggaataatagaagaagaacctctgaaaaatctgtttctccacaaataaaatagtaacggcagaaacgccaaagtcagcttgttcagaactcttgatagttaaaggactcaatcaatgtgaggagcatctattcaagaaaaaaatggctcagcctcagtaagaatagcatgctttgtaccattttaacttcccctctttccacccagatctgccatagcctttgttgaccagcagccttgcaaccactgggggaaaagaatgagtctagagtaccctgaaagtcccatccccagtaagtggccactagttccagcagctccgtcaaaaaaaatcttgttcttagggcttgtctttattttactttaatcagaactcacttagaaaccgtatccacagaacatccatcagaaatagtcggtgatccttactgaacatcacggctgccccaggcagaaacggtgcaaaccagagactgaccagaagcttagcaggcaagccggaggccagcaagagacccagaagggaaatctgaggagcggggtgtcccctggagggtttggaaggcgccaggatgttcctaggaacccagaaggccacacatgcaggactgagcacaagcccagggatggcctaagaaactcagtctgtcagatgaacttgagtctctgcacagacaagaaagaagactggatgcgagttgtaagctgcctgaacgcaggcacagagctcccagcaggctcagataccggttcaaggaatttaaggaagggaagtcctgccccttacctgaccacttagctaaccgagcagagacttcaggggcacacaaagcgagaaatatagaccttacagaattagtttagggaagtcactaaaaaaaactgacaagaaaacaaaactggacattgggatgggaggcactcagctctcatcaccgtctaacttttgatccctcccttcctctcgtacccttgatggatctgtcagtaaatctagtcagctttgggtagaatctgaccacttctcaccaccaagctatgatcagttggctgacttggatttttgcagtggcaaaattgttccctgcctcccattctttttttttttttttttgccctttcccacccttaaactgttcccaaagcacccagagggatcctttgaaaattaagtcaagtcacgtcatgcccctgcccaaatcctctagctgcttccactggcttcccttctcagcgtgaaagtcatcaaaacgccacaggtcccccctgccggatgccctgctggctcccagacctcagcccgctcccccaggctcggctttagccgcactggctgctgaccctccaaaccgctggggcctacttggggccttggcacctgctggccctcgtgttatctgcaaagctggtattttcccttctctgagtttttgcccaaatgtcctgcacctcagatctcagtgatgcctttcctgaccatcctgcttcaaactccacaccttcgtcagacactcttggtccccttttctgctctatttgtgcccaccatgttttctgccatgtgatgccgtgtaaaatcgtacgtatgtcttgaatgtacatgtctgtctccgctcactagaaactgggcaccgtggggactgggatttctgacggttagttcctgctgtgtctctgtgcccctgagtgcctggtgctcattattaggccctcagttactgtgggtgaatgagcaaatgaaggagtgagtgctcgccgggcgctgtgccaggcccttcagtccccatcacagccttccggaagtgtccccttggggcccacgagccctgcgtggctctggctgcacctgtcctccgtacccagcaggactttctgggcccgtgctcctgtctgggagcctcactgccccggagcccgtggggaaggccctgcgggggtcacagatgctgcgctgcgacgcggggaccagtctggacgtggacggccgtgtgagcccacacccggccccctctccagatgcttctccctggggctgggggtagcagtgtccctgttttgcaatcaatgaaaatgaaagaggctttttagaaaaaccagtggaggatttatttttttaatttattaataatataatcaccacataattgtttctggcttcttattattaagaagggcttaatagtagaaaggcttccctgataactcagttggtaaagaatccctctgcaaagcaggagacccacgatctgctggagaaaggataggctacccactccagtattcttggacttccctgggggcgcagctggtaaagaatccgcctgcaatgcaggagacctgggttccgtccctgggttgggaagatgccctggagcagggaaaggctacccactccagtgttctggcctggagattccatggactgtacagtccatggggtcgcaaagagtcagacacgactgagtgactttcactttcactttctattattgagggtgataacattagtaagggagaatccagtcatttaatccatgatttctgaaattggattttttttttcattttttaaatatatgtacacacttagaccattgtagtataaataatttatagaaaactctagcacttcttcattgttttaaaaaatggacagctattctgatacataaaaaaacatgcatcttaatactccatggagtcattatgttgatggtgtgcataaagaagtatcctaatattgatcatttattaaaagcagtaaactcagtagcagtgaaagtatctggtgtttcattattgctactgaatttttcttctaggacaaaattctaaaaacatcagttcctccccgagcattgagagtttgcctggagggagagagttcactggctccccaccttcatctgctgctaagaaggattcctttttcagcaacatctcccgatcgcgctcacacagcaaaactatgggccggaaagaatctgtaagtattttaaggacagttttctttttattcttcattttcctctaaaatgcctcatttgtgaaagcctcttttaatgcctagttttataaagttcttaaaatcattatggactaaaatgaaatatttcatcaaaaatattttgattcttataattcagtaatattttaaggttgttgtctgtattatactggattggggacaaggtgacgtagtatcaatttaaagtcagatgaatcctaaattttcattctgttcttttttgccaaagcctgtgttgtcttctaaaatgtaatggtatcatcataacaaaccacagaataagacactttaaacagaccaagctgttcacgttgcattggtagccactgatgccattcgtatgcagtactcgagcatacagctagtacatagcaactacctaaaaaaaatctggcttctaaaaaattttaagtcaccttcacaagaactaaaatgtttatcacattttatagctaattcaacatgatatcctaatatgaagaattccactgcccactggaagaggatgtaaatgtgaggccttacagaaaggggtctggatgtggctgaaagggtgctgagacggcagagtaaggctgctgagatgcggggctgtaaaacgtctgagggataattattcatggctcgtagacacagtaacagcgtggtgtctctctgtgtgactgtaggacacgcagtgtcctggggcctcggccgcctcatctgcagtttgaagcgctctgaaggggagatgtcaccgcacactcacctggggtgcttctctcatatgcacaagagcagtgtggaactttcatttgacggtggcagctttaatgcaagcagttagctctgctccctcctaaactccactccaagacagttaaagtcattggagataaaccctccgggaataagaaacactagagaaagcaacagcaacaagatcttgttacttggaaagcagatgttaagtggaagctaatgcagcagcctgagaaagctgaacgctaaggcagcagtagggaagaaccaggaagcaacttgagtgagatggtagaccctctagaagctcaggagcagtgggaacttaggagcagggtggacgtggagctgaagacatgttatggttcagccactcagttgtgtctgaccccatgaaccgcagcattccaggcttccctgtccatcaccaactcccggagtttactcaaactcacgtccatcaagtcagtgatgccacccagccgtctcatcctctgtcatccccttgttctcctgtcttcagtcttgcccagcatcagggtcttttccactgagttggctcttctcatcagatggccagagtattggagcttcaactttagcatcagcctttccagtgaatattcagggttgatctcctttaggattgactgcttggttctccttactctccaagggactctcaagagtcttctacaataccacagttgaaaagaatcaattcttctgcatttagctgcctttatggtcctgctctcatacccatacacgaacactggaaaaaccatagctttgactatgcagacctttgtcagcaaagtaatgtctctggtttttaatatgctgtctaggttgatcataacttttcttccaaggagcaagtgtcttttaatttcatggctgcagtccccatctgcagtgattttggagcccaaaaagtaaagtctgtcactgtttcaccatctattttccatgaagtgatgggaccagatgccatgatcttcatttttagaatgttgagttttaagccagctttttcactctcctgattcaccttcatcaagaagctctttagttcctcttcactttctgtcataagggtggtgtcatctgcatatctgaggttattgatatttctcctggcaatctcgattccagcttgtgcttcatccagcctggcatttgtcatgatgtactctgcatataagttaaatgagcagggtgacaatatcagcctttcctgattctgaaccagtctgtttttccatgtctggttctaactcttgctttttgaccggcatacaggtttctcaggagacaggtaaggtggtctggtattcccatctctttaagaattttccagtttgttttgatccacacagtcaaaggctttaattagcatagtcagtgaaggcagaagtagatgtttttctggaattcccttactttttctgtgttccagcagatgttagcaatttgatctctcgatcctctgcctttctaaatctagcttgtacatctggaaattcttggttcctgtactatgaagcctagcttaaagaattttgagcattaccttataaatgaaagaaaaccccatacctgccagagggcacaaacagaaccttgtgtgtgcccggacccaggagaggagccatgggagcctgaggcaggcccgcctgcgagtgaggggccccagcagaggcgcagccagcggcgaccctgccacaggcacaggggctgcgcagccgccgtcctggagggggttaccattagccccactgcagagcgaccggaactctggggacaaagagatatcccacagacacacacagttaggcgagaaaaattcccaacaatgggtcgggaattatagtagctgcaggttttgcgtggcagcaccagaagtaaggcagtggaggaattccatcaaagttctgagaggaagtcacttccaacctagactcagtcccccaccaagctaattaactgtgagggtaaaatgcagcgactttcagtcaagaggttcaaacacgtgtattcctgtgcacccattctcagaatcccctggaggacatgccccacgaaaaggaggacagataccaaggacagagagcattcgggagcaggggcagagcatctgacaggcaccaaggacagagaccgctcgagaaccagggcagagtgtccaacaggcaccaaggacagagaacgctcgagaaccagggcagagtgtctaacaggcaccagggacagagaccgctcgagagcaggggcagagggtctaacaggcaccaaggacagagaacgctcgagagcaggggcagagggtctaacaggcaccaaggacagagaacgctcgagagcaggggcagagggtctgacaggactcttcagaagggcaatgtaggaaatcctcggagctcgtggagcacactgggcagccgatccgaagagcagccgccagcctggattggagcaagtcagaaagttccagaaagttttctctaaaaagatgaagttggaggaatgactagtacgcttaaacaaatttagaaatttatgcagctaaaggtgagttttaagtttgaattagtggcaactttataaaaatgaaaccattgaaatccaggacaagtgataactccaaagaaaaaccaagagagtacaggaaagacgaacagtattgatgagtcctgtcactcagccaggccaggagcttatatgcaccctgtcatgtaggtgctgacggttaatcccgatcacgtcccatgagaaggtgagtggcagccgttgcctggggaggaaggggcagtggtggtcagagctgcgtcttcatcttccatcttggaaatcagtgagtagtcctctctagaaaaatcaggatgtggcaacataagctagagctataaaagtgaagggaaggaaaaaacagtgagaagaattgaaagtggctgcttgtggagagcaggaagtggagggtggggctgtgagaactggttttcataacaagccttgtagagccacttgagtcttcaaactgttacatatgtagcttagattaaaaatgataaccaaaaattacaacaaaaatagaatgtttcggcataatagattagaagaggagctgtctgcctgcacaaagagcatgtctctgaagagcgggggtgaggactcagaagtgaggaggcatatggagacgtgttggctctgcgttccgtcctgttctggtggcatatgggttaggctgcaacaccaatgaatgacttttcctttatggtgcggctgtaacttaaaactgagaagttgagcgaaaatagagacggagtaagtctagctctctgcagagatctgctgtgaacccagaaacagagggccccctttattactcaaaatttaatgtctttcttaacttgtggggggtggacacattttcaagagaaagcccgtcgttttccaagtaaaaggttatagttttagggaataatggctgtggtccgagctctctggtccagctatgcccaccgtaggcaccagctaggactgcccggtgtggtccgtccgccctgtggcctgctctgtcctgggagctggggacggcagcggcaggcctgtggttgtgagcccttcttcatcttccctcctggcacagtgagccgagactgtcgctcctcctggcccgagcaaggctggacacgttcaggtccagagctgagactcgatctcccgagggagccaagtgctgccgccagagtggtcccaggggcactggagctgcgatgagacgcctcccatccattgctttcatttccagccccgtttggtgcgatgcagggatattccatgtcctcagaaaagttcagagtaatttttcagtaacatcatcatcaccaccagtttctctcacagcaagtggccagaaattgaagcaaagacatctgttgctttgggtccctggtgccataaactgtatgatgcctttcagatttcaagactcagttgatctcttaaagcgtcccagggttgataaattactgatgtcagctaacaaaaggctgaaatagcagttgataacaggcattaaaacaaagataatctagcggtagctgtcaacccagagtggtgagatctgcttataatgtttgtaatctaatcattgagaatcgatttttcttcatcatcaatataagtacaatgtatttttaacaagaatcatgtattaggtcatagaacttatttcctctcatcactgccgttttatgtcttacagaaagactttttgtaatccgtaggctgccttctttaaatgtgctcctgttaatgcctccgatctggttgcataataaaagaacacaaaactcagctaagtctatagagaggtaacaaattaagctttttgccatttatttataaaagacattattatagtacttttctgaaatgtacacaaaccagtaagaagtttaagaattgaccttacttctttatcagtagtagtatattctgaaggttggtgtttattcatggaaatgattttccctctgctttgcttcctggaagtctgtaggtcacaattctatccaagtgatataatttttcctcaagactaaaaaatcagagctttttcagtcttgaggaaattggcagttttgatactaaagttttcatgctttattttgtgtggtaatataaatgacatccagtacttagttttctagaaatctattttagttggtcattcatccgactgctaaataaatttttacttgtcttagcaccattagtcatgttctatgattgttgccaagtcgttttccaagaatatctttgctgaggttaaagtatagagaatataagaaagactctgaaatggatttgtgtagctgaataagttctaatatttaagcacattagccaattaaatgatcttttctaaatttcagatgaactgcaagacattttgctgtggtttgtgataattacataccagtctccaaagatctaaactgataaatggttcagagtcctctctaaaccacaggaaatcaaaattatctgagctgaaaggtcctgcataaaaacatgagctatccactgcctgtaggctcaccgcacccctggggacaccaccctgtgtctttgtgacccccacacgcatccatcatcgccctgcagtagtttgaacatatgcttttgtcatacgaatagaatttatttttataatttccattaatctcatctttatcacagcaaaataacaaaaagtgtcagatgaatgaaaacagatttgaaagcaggctcatacttccagaagtataggtaccctgaacatcactgatctaccccggtcttattctagaaattgaaatttaaggcatgcccatatggcagatataagagagcaggctcactgaaggtgcttagagcgaaactggagaggggagaatacgttagaaatcatagttacagtaaataaaaataagattcatcagtgagagaggccttaggtgcatcagtaccgtggaacagtgaagacagcgcggaagacgggctcagaagacagaccaccatgggctttgttggtctagaccagcttcacgtgagagattagacttgaaccgcagccgcccatttcttcttcccctacgtgcagaccccgtgacttccaggcagagaagggtgtgggggcgcgatggacaggcaggcggcggtgtgcgcagagctgctctctcctcctcacctcctctgacagtgtaaggtggttgggactgtgccaagtggcttttggtaaacaggagaggaagtgctgtctcagatgcagaaatctgttgctcattgtctcagatagcaagagtctccagagaggcaggtctggtgttggagggcacggtcctggtgtctgcagctccccgcgctgccccctcggtggatcggctggtcccccgtctgcccccgtcactgttctcaggaaggctgccgccaaacctgccagctaccctggcatccctaagcctcactcacgcatcgtcgtcctgagaagtctgtttgcaagttccccagcgggctccccctcccaccccagtggctggccagaattcagtcccaggcccactcgggttttggtttttttaaagctttgttttgtattggggtatagctgattaccagttttgtgataatttcagatgaacagggaacgggttcagccgtacatatacctgtgcccactcttccccaggctgccctgagcagggctccatgggctgcacaggaagacctgtggctatccaccgggaatggagcggtgcgcacgtgccctccccacgctccctaactgtcccgtccccccagccatagggtcgctaagtctgtgagtccgagtctgttttctgagtaagttcgtttgtatcgtttccttttagattccacgtataagggatgtcatatgacacttctcctcctctgtctggctgactcactccaggcccacctggcactattccatcctttgcaacggctcagtcacactccactgtgtatatgtgctgccgctccttaacccactcctgacccagtcagcacggggagaggattagagaagtccctgacagtgtgtgtggtcgggtgtccagatgcttttgatgaatccattatccctgaagtattaattgccaaaatggtttatcagctccttccctaaagcactgccagttgtcgtttcagtggtgttttcagtttagttcagttcagttcagtcgctcagtcgtgtccgactctttgcgaccccgtgaatcgcagcacgccaggcctccctgtccatcaccaactcctggagttcactcagactcacctccattgagtccgtgatgccatccagccatctcatcctctgtcgtccctttctcctcctgcccccaatccctcccagcatcagagtcttttccaatgagtcaactcttcgcgtgaagtggccaaagtactggagtttcagctttagcatcattccctccaaagaacacccagggctgatctccttcagaatggactggttggatctccttgcagtccaggggactctcaagagtcttctccaacaccacagctcaaaagcatcaattcttcggtactcagccttcttcacagtccaactctcacatccatacatgaccacaggaaaaaccacagccttgactagacggacctttgttggcaaagtaatgtctctgcttttgaatatgctatctaggttggtcataacttttcttccaaagagtaagcatcttttaatttcatggctgcagtcaccatctgcagtgattttggagcccaaaaaataaagtctgacactgtttccactgtttccccatctatttcccatgaagtgatgggaccggatgccatgatcttcgttttctgaatgttgagctctaagccaactttttcactctcctttttcactttcatcaagaggctttttagttcttcttcagtttctgccataaggatggtgtcatctgcatatctgaggttattgatatttctcctggcagtcttgattccagcttgtgtttcttccagtccagcgtttctcatggtgttttaattgtgggattttaggtagcctgagttggactggtaattgtaagatagagattgagcagtggccctcccagtagtcagaattttcctagttacctgatttgctcttcagtcagtgagtataatatatctatcctcccaagaaggtgcattatgtggacagtgctgatcatgatggatttttttatggctttctggatgcaattgaaaactggcatctagagtgtatttaattatcgggtttttttcagttaatatgtcattatgatttctcattatttaatcagtaataccaatgataaatggattaaagtacaatcctatttaaaatatattcccatttaaggtagtttattgaaatgaacttaaacatcagtttttctagcttcttttaagtctcagaatagaatctaaatttaaagccaaaacgaactcatgtattggatccatatttcacttgtcacttggtgctatataaagcgtgctcatgtcgcaagccttccgccagtgtgtccgctcagggtcggggaagatggatcgtgcgtctttggaggagtgtcccctcccctgtcttccatctttttgccttacccagtccatggaagatcactgcaaagaagcgtgggcctcggaggaagtgtcctgaagagccctctgttgttgacagtctagacgctggcagtctaagtttaacttttgttaaacaggttttataaccaacttttcacttcttgcatcaataaatttatttttaatcaaaatctttgaggagcctctgaaaacagaaccacagggagcggaatggtcagtcttgacttaatgccctttttaaggctttaaagagggcgccctttggggacagatgagacactcatctcctcatgctgggccttcttcctccttcatttgtcttcagcctcataatctccgtcaagaccaggatgctgatcactgccccggaggcaaagacgatggtttggggagagctccagtgaaacagagatatttagaatccccggccagaaattcctgtgggtttgaattatcctgttaagtgtgtcattgacaacatttgcttcctcacgatgaccttccttgaaccgtggcgttgattccatcttttaatgccatgtcgccttgggcacaggaacaggaggaacaggaactgccctgcgatccacctgtgcgtaagggccagagctgaactcaggggctcccgggccgcctcgctccaccctgacccccagcccgagtctcctgcccctagcgtccacggtttaccttttccaggaagctgcacttgtcatccactgggctccacctgcagaaggggtggctgtgctcctgtcacaggaattctgggcaaagcgggggtctgtcaagtggcctcccccttgccttgagaccttaagggcaagtcacacctttttggttcttcctcatgagtcagcaaagagctgactcattggaaaagaccctgatgctgggaaagattgggggcaggaggagaaggggacgaccgaggatgagatggttggatggcatcaccggactcgatggacatgagtgtgagtaaactccgggagttggtgatggacagggcggcctggcgtgctgcggtccatggggacgcagagcgtcggacacgcctgagccacgtgagcagcaccaccacgtcagagctgttgtgcccagaggctcggtcagaggccggacgcctcttcctgagccctgccgtctcccctgcgtcttctgttaccaagtgcccacgtgtccagcattcgtgactgggttgggcaccagggagcccgtgcctctcgcaggggtgggaggagcagagacgggtgtcgcccatgctgcccaggtgccgcttccggagccctgctgagggcggggggcggctcacccacccagcggcagcctgagttgggggcggttcatttctctgcccagagggagtatctactccccaagtcctgtacccaaagaaggtgactttcttcctagttaagtttaaagcatgttttaggttagaaacggtgtccctggtagctcagctggtaaagagtctgcctgaagtgcaggagaccccggttcaattcctgggtcaagaagatcccctggaggggggcatggcaacccgctccagtattcctgcctggagactcccctggacagaggagcctggaggctgtagtccacggggttgcacagagtcagacacgactgagcagctcagcacagcgccactcacagcgtgggttagtaaagggcctcaagagaaggttatccgtgttggaaaactcagcatctttccattctgtggcagtgacgataaaaaaaatacagatgggatcgggaagacttgctagcattgacacagtaactaataagatgagggaagaaaaacaaaacctcatttgaccataaaaataagaataaacataatcttacacagagggttcactgctcacgctttattaagcctcttcataagcatgtctgtcattacaaatgcatctgattactttgtcataactttgattagattaataaaatttgctcatatacacttgaccttcatctgaggtgtttgcttatgaagtacaattggtcatgagcaaactttaaatatgtgaaaaagagcaaccaccaagaccattctcagtcaggacattacagtgtggctgaaggatttaaaaagcctcgaccacatggatcaccagaagataatataactgagttcccacacttcctgtttttttaagatgatggcaaacccagccctcttttccctgggaatggtcaccaatttaatacagttctgtctatagccttatcatttctagtcaaatagcattttccaaagttacttaggtcggttggtagaaacttgaagagcagtatctgaaagcatgatgataataagtcatgaacaaactagctttccattaaatcctaaatagttatgggctccgttggaaacggagagaaaagaatgaagagacatatttcagttggaagactagttacggaaggggcgctcttccctcacccctactgtttgttcctggactagactgagtcccagcttccttgggcgtatttcccaactgtgttttcaccgttaacgttcctactgctctgctctaacacttgctctaagacttgtcttgctccttcatctagaacacattccttccacacctcattttgtgtcagtttccctttgtgtgaatctgtgccagtttacactggcatcgttacgcctgcaggcggcggttaactcccctgagccgggggagtggccgtctgtaggggatgccctgtgtcccagccgcgctccccctgttcatctgctgaggcccagggccggctggtcgcaggagagtgtctggcctgggctggtggactgggtctgtgcgctgcggggccgtggttcccttcctcctggagtctgccccctggtaggcgaggctggtctagagcttcctgcaggcttcctggggagggaccaatgcctgcccacgatgggtggagccgggccccagccttctggtgggcaaggcccgctgtgtttaggagagacttaggcaggcagcctgtctgctgaagggcagagccatgtccctgccctggtggtcatttggcctgaggtctcccagccctggagcccacaggctgcaggccaaggccagcccttggtgctagccacctgagcgagacgtcagcctccaacaggagtccgtgagagtgaatactccccaacgcatctgcccccggcttgtctgcccccggcttgtctgtccccagcgaagtcacagctgctgccagcccccaccccctcccccagcaaccccccaagacgagcagccaggtctgccccaggcccttatgaggtcgctgctcgggtctgggatctccgtgggcaccctccaagagaggagtctgcttccccagccctacggagctctcgcattaagcctctgctctgcagagccaagggctctgggggcacctcctccagatgctggtcctcaggctggggcccggcctgggactccatgcactcactcccgggggagagctgctgcagtctctcacctcctccccggtctgggtcgcccccccggctgatgcaggctttggttgtatctcgagtgccccctcctgccatcttgtcgtgatttcttctttatgtctttggatgtagaatatcttttttggaaggttccagtctttttattgatgatagctcagcagttagctgtgattttggtgtgctcgtgacaggaggtgagcttgaggttctcttcctaaataaacccattctgacaataccttttccctgcaacggtgcaggctctcagactagcatctaggatggctgacaggtgacccgtctgtcaggcctcccctccgggaggccctcttggaggccatccacagcgaggacagaattgtcaacaaggccgtgaaagcttgcagtgcatgcctgggttccttctcaggtgccctcacttacctcaaggattccactaacaaggcggtggaaagagctggtaaccgatcccatcaacctgccctgcatcccacctccacacagtccagaacctggccgaggtcctagcacgcagtcgtgctgcaatcagtccagaatgagctgtgacatcgcttcccctcaggagacgctgtctagactggacagtctctggggctggagcatgtctgcagactggagcatgcatctgacccctccatcatgaaaagatacatactctgtgaaacattaagagcaatactttggaaaacgaagttgaagaaaaaagaatgaaaccagcaaggaaccactagataataatgctagcatttatagatgtcttaaattcatctctagacagcaaactttagtatcatccagctagactattaatagctctttgccgcccaggatgaatggatgttgagtttctctcagtatctataatcagcgtcacccatccgtaggctctattatgactgaactccttttttgatatccttgatgaaagtctccaaattagggttgaaggttgggtcagtacaagattctttcccccccccccccgataaatgagcaggcctaattctttttgctaggaactgagatttaaatttctgagatggactgatcaatgtgaagactgtttcagggcattccagtgaaggtgtcattatttaggatgctttcagttgaatataatggaaatcctgactcaaactgatccaaatagaaacaggttattagctcagataagtccaaagaacttctcattccttggctatgcttggaattacctggagagcttaaaaagcaccaggatcagaagtacggaatcagaacctcctgtggggcttggatcctggtaatcgttcagagcttccggggttgttcagatatgcaggcgaggtttggggcagatgatgttgaaactcatcgacgccttcccgggcccgggttcccgccaccctttgtgctgccttgctcagaggcccgtcctccatgcagaagcagggagaggagagaggccatgtcttctgccgccccggctcgggttggcctccccttccgggaggcttctggctgcaaggcccccgtgggaaaggccggcagtgaaggggggagcaccagcgcccacccccacccaggagccagagtccattcaggctgccattggtgccctgatctccaaaccagagctgttctgcaggtggttgcttctgtgacagcataaatcaatttgatcgtcatgagtgttttcaccttcaaaggaacaggaatgttcgtgaccgttttgtcagaggcagtttgtgtgttcccccgaaacaccacgccatgcagaatcgttgcaaacccctggacccatggggaaaatgagcttggggagcagcattcagaaacgtcatcagtgacccctgcagcggggacctagttgatctgacacatgttaaaatgattatgaaacaaacagcgcaataaataggacccttcaccttgaatgacacctgcagcttggctgggaagtgaacgcaggagaggtcacagctcgtgagttatgatgaaggaatggaaggagaattctctggaacctgacagattagggttacatgtgctgctcatcacacaggctgtgaacccgggtcactgacagacatgtgaagggtgtgcatgtgtacaccctgtcttcctgggtgtctgggtccagcttcgtgcatgtgtacaccctgtcttcttggggtctgggtccatctttgcacatgtgtacaccctgtcttcctgggtgtctgggtccagcttcgtgcctttgtacaccctgtcttcctgggcgtctgggtccagcttcgcgctgttctctgcgttcaccctgtgtttctcatgggtgcagctctgcctgagcaaacctggtattcacactctgcccatgtgccctcatccaccagtctcgctggaacaaactcacatcttcagtacaaacgtcttaacagccctgtctctactctgggtatgctgggtagcttctgaattgggttgggttgaggaaaggaaaatacgaaaaggttacacttgccgtatgaatttttgatctcagagctctgctcggtgacagtgttctgctgatgaggactttgagagtgagcccattctctccagtttactgggcacggctgattcacagggctgtgtttcaggtgtgcagcaaagtgacccagtctcacacacgtgtatccactcttctgtagccaccacccccagtgtctaaccccaggtttctcaccaagtgttgactccgcatctgcatcctgctcagagttatggggggctccttccctggggtccatctgggagcatgccctgcgggaccctcatcagagttctggggggctccttgcctgggatccatctgggagcatgcctgcaggaccctcggcagagttctggggcgctccttccctgagatccgtctggagacgtggcctgcaagaccctcacaccctcgccctgtgcagccttggcacaagctccgctccgagcctcagccttcaagggatgtgcagccatcccaggcgcttcgctccgagcaccgtctcacccaccctgggctgctctgctacaccttctcttctgaccggaacgattcacgcaggcacaggtgtcctggagttcccgccggtctctgcccaagcacctctgtctcacagagcctttccaccgccctccggaagcttcaggcacttccaggaggccgctgtgggcctactgaagctcaagagtccagagtcaccccctaacctcggaagacgggtgtgtccagggttatctgcagatgcttcctttgctttcactgttggagagctgcttgtatttagttaataatgtaagactcagctttaacgttaattgtgtctgtaacggtaacactgtaacagatgctgtgtctggcacttggtaagtgtctaggaatgagtgaaggctgttgagggctctgtgcagcgcagggattcagatgctctagacttcctttgggcctttgctgaagcctgaaaagccacctcactgggacttccctggtggcccagtggttcagactaaaccttccagtgcaggggcacaggttcggttcctgctcggggagctgagatcccacacgccttgtggccaaaataccaaaacataaaacaggaatgatgttgtaaccaataaaaactttagagatggtccacttcaaaaaaagaaaaagtctttaggaaggaaaaaagtcacttcttgcccagtggcattcaccaacctgaaatatggaaactatcaagagctggtggtacacagtgagaaataggagttttacaagttagctttatggacagaatattttaaagtgtgataggtgtgtgagtaaaccagtaatttagacaattattccatctctttttttttttattccagaagtctcagaattggtaatgtttgtgttcatcaaagccattccaacacttgctttccttttaccagttgtgacttcaaatatttaagcatgcttgatcctcagctggtatttccgtgggacacgctttttgtttgtccctaatggaacatacggggtcagtgagcccagagaacggtgcacgttgcatcctcacacaggtcagttagcttcgctgtagagaagcaggcttggccgtggccctctggtctgggtcagtcattgtgcggacgcctccttccgcacagcaggggaggcgcgcagatggtgataccggccagcagctctgagaagccccgctggaggtccggtgctgcctgcgtgcttgcgtcagttggtctgatcacgtttaagagaagaggggaaagccctcaataaatgaactaacatctgtgttgactggctggtggaggagacagccattccgtttcacaaaagattggtcaggttcctaagtatgaagacacagcatgaaggtgatggcctcacaggccaaaagacggggacatgtccccaccagtgccctttaattagcctgccaaatacactccctgttaggagagatcttttcccccagtttaaatgttcagaaaacaggcagttgccttaacaactgtgcctaacattttttctaccttttgaatttttaaaggctaggaaattcctaagacccaccatacacatatgattatttatttaaaagagcagtaacaggatttttgaaaatactaaggtttgtaactatgcaagtatggttttattcttgtgttttcatctatgtgaggttgccctagttaaaagattttattttaatgtctaatgtttttgtttcaggaatgtaagttttttcagtctactttagaatttatgatacatgatccagttttctgtcatcatccttattttttctgtttacactattgttttttgtaatcaacctccagaaaggcagagttagactaaagtagctcacgatgttgaaatggtaataggcaaaaaagcatatttccgaaagctcagtgtattgaataatattacttaatcatattattaataatcatatatttaataattcagtcacattacttatgaatattaaaatatcttcagaaactctgggatgaatttaaacaaatttaaacaccatagattacgaacacagggtaccattgtctttttattacccttgtgtttgaaaagcatcctttactccctgatgctcatacacagcctccgtctatcaagagttaaaggggagaacatgcataacccaacaaaagcatctcacctttggctctgaagtaggtgtttgtgggtacagtagaatgaattgggccctgacagtgtaagggttaattccgaacaggacagtgaggctgctctggacgaactggctgagggagctgggaaagctgtcctggaggctgtcaccatgcttctcccccccatcccacgcacgctgagaagagtcccttggactttgaccaagtgggcatctaaccacgcagccatctgttaaaacatagagcaaggacggagtgaagtgcttcacggccttcccagaggcgctggaagctgtgttcaggagtacacctaaatccccgccatccggagtatggtcccagcccagctgggtagtcaccccggaagcttgtcagaagtactgaggctcaggccccagtcagacctgctaaagagacttcttcaggtgactttcatgcctattaaatgctgaaaagagtgagtctaagattgacggaacaccaaatcagaaaaatgagattttctgtagattaagccagcttcagatacgccctggtgtgagcatattctcctggtgggtgatggggacgtgccctccaagtgtgtgctctgctttgtggccatttggctcgtattagcgcctgtaatcctcaagagacgctctgaggtcggtgctagaattatcggccatttctcagatgagagaaccgaggcatagagaggctctgtcgaaatcccatctgcaaagaaagttactggtcatgacgggacagtgggtaacttctgccttatcagagccagaaggctaaaatcagatgagaaactacgatcttcttttacttcctcagtaaaaattatgggaggcagtgggataaggggaaacttctttctcttcatttgtgagctctgcctgttctaattatcaaatgtctataatccgtatcccctgtgtcccacccatggcaagcacgtgattggagttaattattttaacctgcccatacctgacttcgaaaggatatatggaacactttcacatatggatcagtgaagtgaatgtagatttactatgcacttggtcaattggaggggattgctgagaggcacgcagcagtttggaagagaagctgtctgtgtggagacctgagcgtctccctcccttccccaggtggccggcccgcggctgtgcctgggcggcggcggcggcggcgggtcgggatggccccgttggcgagctgctgaggcggcgtgaccagagagcccggctggcaggcacctggctcctgcccctcctggctcgtttgacggcaggtgacttttaccttcataaggagcacgtattcccttctttattttggtaaaataggcccaacgtaaagttcacggtttaccacctgcgtcattgttaaggtctcactcagtggcattaaactctttcgtggtatagtgcgtctcctgcatcactcttatcgtgcaagtttagaacgctgtgcccattaaacagtagtaactttctctcaactaccgttcgtctttatgccttaatgatgctggcccctcgaagcacctcatgtaaatgctactctgtgcaaatatggttcagtatttgtgtttttgtgacttatttcactgagcataatattctcaagttttgcccatgttgtagcgtgtgtcagaattttcttcctttttaaggctgaataatattccattgtgtgtacagcatgttttgcttacccatccatgtgtcggtggacacctgggtggtttttatgctttagctattatgaataatgctccagggtacatgagtgtacagattttttttttttttttgaaactctgctttcaactatttggggtaggtatatactcagaagtgggatcattctggatcactctgtaattccatttttactttttgagtaacgttcatactgatgatagaaacaaggcccaatgctgtaaggagcaatattgcatgggaacctggaaagttaggtccatgaatcaaggcagattggaagtggtcaaacaggagatgacaagagggagcatcaatattttaggaatcagtgaactaaaatggactggaatgggtgaatttaactcagatgaccattatatctactactgcgggcaggaatccctcagaagaaatggagtagccatcatcgtcaacaaaagagtctgaaatgcaatgcttggatgcaatctcaaaaacgacagaatgatctctgtttgtttccaagacaaaccattcaatatcacggtaatccaagtctatgcccctaccagtaacgctgaagaagctgaagttgaacagttctatgaagacctacaagaccttctagaactaacaccccaaaaagatgtccttttcattataggggactggaatgcaaaagtaggaagtcaagaaacacctggagtaacaggcaaatttggccttggagtacagaatgaagcagggcaaagactaatagaattttgccaagagaacccactggtcatagcaaacaccctcttccaacaacacaagagaagactctacacatggacatcaccagatggtcaacaccgaaatcagattgattatattctttgcagccaaagatggagaagttctatacagtcggcacaaacaagcctgggagctgactgtggctcagatcatgaactccttattgccaagttcagacttaaattgaagaaagtggggaaaactgctagaccattcaggtatgacctaaatcaaatcctttatgattatacagtgaaagtgagaaatagatttaagggactagatctgatagagtgcctgatgaactatggcagaggttccttacactgtacaggagacagggatcaagaccatccccaacaaaagaaatgcaaaaaggcaaaatggttgtccaaggaggtcttataaataggtgagaaaagaacataagctaaaggcaaagaagaaagcaaagaatgcagagttccaaaaaatagcaaggagagataagaagtctttctcagtggtcagtgcaaagaaatagaggaaaacaataaaatgggaaagactagagatctcttcaagaaaattagagataccgagggaacatttcatacaaagatgggctcaataaaggtcagaaatggtacagacctaacagaagcagaagataattaagaagaggtggcaagaatacacagaaggacagtacagaaaaaatcttcacaaccgagatatcacgatggtgtgatcattcacctagagccagacatcctggaatgtgaagtcaagtgggccttaggaagcatcactacaaacaaagctagtggaggtgatggaattccagttgagctatttcagatcctaaaagacgatgctgtgaaagtgctgccctcaatatgccagcaaatttggaaaactcagcagtggccacaggactggaaaaggtcagttttcattccaatcccaaagaaaggcaatgccaaagaatgctcaaactaccgcacagttgcactcatctcacacgatggcaaagtaatgatcaaaattctccaagccaggcttcagcagtacgtgaaccgtgaacttccagaagttcaagctggattttaaaaagccagaggaaccagagatcaaattgacactatctgttggatcattgaaaaagcaagagaattccagaaaacatctatttcagctttattgactacgccaaagcctttgactttgtggatcacaacaaactttggaaaattcttaaagaaatgggaataccagaccaccttacctgcctcctaaggaatctgtatgcaggtcaagtagcaaccgttagaactggacatagaacaacagactggttccaaattgggaaaggagtctgtaaggctgtatattgccactctgcttatttaacttatatgcagagtatatcatgcaaaacaccaggctggatgactcacaagctggaaccaagattgccgtgagaaatatcaataacgtcagatatgcagatgacaccacccttatggcagaaagtgaagaagaactaaagagcctcttgatgaaagtgaaagaggagagtgaaaaagttggcataaagctcaacattcagaaaacgaagatcatggcatccggtcccatcacttcatggcaaatagatggagaaacagtggaaacaaaggctgactttattttggggggctccaaatcactgcagatggtgattgcagctatgaaattaaaagacactccttggaaggaaagttatgaccaacctagacagcgtattcaaaagcagagacattactttgccaacaaaggtccgtctagtcaaagctatggtttttccagtagtcatgtatgggtatgagagttggactataaagaaagttgagagctgagagaattgatgcttttgaactgtggtgttggagaagactctcgagagtcccttggactgcaagcagatccaaccagtccatcctaaaggagatcagtcctgggtgttcattggaaggactgatgctgaagctgaaactccagtactttggccacctgatccgaagagctgactcatttgaaaagaccctgatgctgggagggattgggggcaggaggagaagtgggtgacagaggatgagatggctggatggcatcactgactcaatagacatgagtttgggtaaactctgggagttggtgatggacagggaggcctggcgtgctgcgattcatggggtcgcgaagagctgggcatgactgagcaactgaactgaactgagcatagtcttttccttatattcctactaacagtgtaccagggttccaatttttctatccgcagcaacagttgttattatctgatttttgggtagtagccatcctgatagctttgagatggtatctcattgtttcagcttgcatttccctagtgtttagtgatgttgaatatcttttcatgtacttgttagccatttctatatcgtcctaggagaaatgtccaagtctttcctacattttttaatcaagttgagtttttgtttcttttccttgctgttgagttctaagagttctctttgtgtgttcttacgccccttatcagacacatggtcagcaagcgtcctctcccactctgcgggctgccttttcaccctggggtccacaggtgctgtgcgtctcagtgctgggacacagcaccgcttcagtggcagagaaacaaaagtatctgcttgtgtaccttctgctcctagctagccacctggccatactaacctttattgataaaacaaagggttgaaatgagttatctctaaaggaaattccagcactgaaatgatacagtttactaagtaccttaagttctgagtttcagtcctaaatgtctaaatgaaatttctttttcattcacatttaccatgtttgtttacatcctgtttgaaaacaggagccattttgtttactgggaatttgataaccgtctttattgttttaagcatctttaagagtcccattttttccagacagccatgacgctcccactttacatgcagagagagacaccactaccctgaaactgccgctccgaggttgtacctcagacatcagaccaaacactgtaaccgttaaccttttcacaggttattcatttaactcattctcaccacttagtattgtttggagaacagatttgtttaaactgtagtgttgcttagagtttgacttgaaatacattttggtaatttaaaaatatttatatatcttgtttctacttgtttcttatttctttattaattatttaaataatattttgatttattacaaaaacataatctgatttcattgtacaaaatccagaaaaaaacgacctgtctgccgccgtttggagaaaacccgtcagtatctgtgttattgttaaggctgtcccatgtgaccgtgcagtgggttgcatgacgctgtgtacaccagtgtgccaccagtcgcccgagtcccctctcactgggtggccagcatgggaatatgcacgtgcgtgttgccttcagcagggtgagggattccctgggcactgttcacacaggtgtctatgattccttggaataactgtataggactatgttaataatctagagatagcgaaaggaacatctattgagcgtttaccgtgtgcaaagcacttcacctggaatatctcgtataattcagtccccaagcatgcgctgagttaggggttattattattcctaatcgtccccgggaaaccaagctcagcgagctgggctgtggggcagggcccagggactgtccgtgcccgtgagatgcacacggtgcggggctgctgagcagccacagtgctcccggcggttctcccgtgggccctcctctgcagacatagggcgcgctggccaacacgtcatcgcactgtgtgtgtgtgtgttcaccctggtgtaaccacagctctgtgtgtgtgtgtgtttgtgtctgtgtctgtgtctatgtctatgtctgtgtgtctctgtctgtgtgtgtctgtgtatgttgccctggtgtaaccacagctgtgtctgtgtgtgtctgtgtgtttgtgtatgtgtctatgtgtctctctgtgtgtctgtatgtctctgtgtgtctgtgtgtctttgtggtgtctgtgtgtgtgtctgtgtgtgtgtgtctctgtggtgtctgtgtatgtctgtgtgtatgtctgtgtgtgtctctgtgtatctgtgtgttgtgtctctgtgtgtgtgtctgtgtatgtctctgtgtgtctgtgtgtgcctgtttgtgtctgtgtgtgtctgtgtctttgtgtgtctctgtgtgtctgtatgtgtgtctctgtgtgtctgtgtgtgtctgtatctctgtgtgtctgtgtgtgcctgtgtctgtctgtatgtctctgtgtgtatctgtgtctctgtgtgtgtctgtgtgtgtgtgtatgtctctgtgtgtctgtgtatgcctgtttgtgtctgtgtgtgtctgtgtctttgtgtgtctctgtgtgtgtctgtatctctgtatgtgtctgtgtgtgcatgtgtctgtctgtctgtgtctgtgtgtatctgtgtctgtgtctgtgtgtgtgtgtgcctgtgtctgtgtgtgtgtgtatatctgtgtctctttgtgtgtgtctgtgtatgcctgtgtgtgtctctgtgtgtgtctgtgtgtgtgtggccctggtgtgaccacggcttccgcaggacaccgaggcctctgcactctgcttcctcagcctctccattcccttcctgcccgccccttgctgcccgccccttgctgaccgccccttgctgaccgcccgtgggcagcgggctctctcccgtctgctggccgcctgctggctgccgtgtgtagcccacccctgccggtggggttggtctcatccccgtgggctctgcagactctgccctcgggcccttcctgtccccctttctccaaaccgggagcactaagggctgccgtgggcaggccccgctgctgctggggtccccggcagggcggggtcgggcccagcccccagagcaccatctcagaaggagatgagggggcaggaagactccagcccagcccagatcctactctccactccccgcccagctgcgggctctttgccctggttcccagcttttctgattgtactgctttgttcactgggtccctgcctcctaaaacatctttattcctcatttcctccaagcccagtccctcttgaagactcatcagaaatgctgctgcttgccgaaaatctttcatttccacctctactccttgaaagccggctgtcctgcccgtgatggtgaaggctctcctctcatatctgctgtgaagctcaatgccttgctcctctcatgcttgacgtgtagtcttacctcttcctaagtttgcagaggtcgttactatatttcccacaagccctaatgcagtatcaatgcatatatttgttgaagaaatgaagtaataaataagtaataaagtacaaaagctcatcctgttattaaccaagaaagaacataaagacattgaagcacttaaccaaagtgatctataaaatccacatgttagaaaacaatttaaacaatttgatgcatataatatgagtgaaagtgtaatgaaatatcaactattcgggggagaatggtggtagaaataccaatttttacaaagcaaattcaaaacacatttctccagatacagtcgaaacaaaaatcattcgagaaatgaaacggaacacaaacgatcatacctgaatgaaggaaaatgacttagtaagccatttagggatgggtctggacactgtaaatggtgagcttctcctaaaggaagctgagatacgaaggcactccttggaagggcctggtaatcgagtataaggaggagtatgcccaggtgagaactgggagccgtgggcaggcggcccgggctcgcacagcgccgcctccacgttggcattgcttccgaggaggtggcttgcagaggcgcccgtgtcatgtgggacatagtgagagaacccaccgcgtgggcttgctgtgaggggtaagtgagttcctgcaggcagcgcccagagctgggcctgccacagcccctgtgaaagggcccgaagccggcggtgtgctcctctgcgggcggacccgtgctctcgctccttccccggaggccgccaggcccctctggtgctgcgctgctcgcacggtctgccggcggcccgcctcatcctccacgtttctcgccccacacggcagtggctctgcagaacttgagccagtggtgggctcccaagtcctaactcatccttctgggtggagccacataaagatgtttacaccagagaccagtgtcttctaagagtgaatcaccaacctccgtattaaaaatcggttctacttcctcatcagttaaattactaatttacagtataacatgttttttattaagagaaactaacttacagagaaatttggctgagagtagacaacggttcaggccctttcttgcacagaatgctgtgctttaataaatcatgatgttgtaatagaaaaaaaaaaatcagttctattgttttgacctgattttaaacattaaagaataatgtcctttgtggagtacctgttctgtgccagacactctccatgtgttgccgttcgggtctcatcaatacattggggggaaaggtgaaatgaagaaactgtttgagattacacagccagtgtcctcaaactggcagaaagaggattcgaacccaggtgtgtctactgcacaccacccacttccaccatcctgcctcccataacggaaggcagaacatgtatgcaaaagcaaatataacgagaacttttcttcatatcttatttatacataaaaatgacactaactggttggttttataaaatttcaaggcaattagccaagcatttatttttgattacagaggaccattaatgaaagcaaatgactaaagctgtctgtgtctgaggtgtgtggagcctcagaagctaagatagaaatggaaagtctctttccacaattttagaatctttattcttggctctttcttttatctgtaattatataaaagagtgaagaataaatgacaaaccagccttgcgccaagtgattccatttctatttataaagtctgagtgatcgttcaagggcttgggtgtattttcattaagcaaactccagcaagatcgtgtactggatttaacattccaaatggaagagtttcttgggcccctccacctgtttcaactcctctttgtctcacagatgggcttttgtgtcagctttccattgagaaagaaagtcttacaggaatgaaaactgctgttttctgccacgtggattccgtttgtactgaggtttactcaggacttaggcaagcaagacgctcttcacttgctgccagtgtctaagccaaagtgcttgcctggaggcctgtgttatgtcccgcgcgctcacgcagcgcgcgccccgggctgccccgcgcgctcagccagcacacgccccggctgccctgcgcgctcagccagcgctcgtgcaggtcgtgcatggcacagtgcagcgggcgccagcctcagtctcagcccactttgctcacagtcacgcgtttggacgagcggacctccctgagccctgtgccccctcccgctgtcagcacctcactacccacaggcgggactgtgtcctccgtctcctctccagctcttcttccctcccagattttattaaaaaaaccacactgaatacacttaatccgtttaggtaggaatgactgctggggtttaaggctcccaagggcttttgcatctcacaaaaagtaatcacttaatccaaactagactcatgcataaagtaaacggagaagagattttaaccagctggtggtacatgcctggtgtcctttgtccattctgggctgtcagcaccccagttggaagccaagggcagggataaactccagccagatgccctctcaagagactgccacgtgctggcctcagtacagttctagactcttctgggtgggtttgtatctgtaacacattgaagaggcaacttgttcaatagtagggacaggaggccaggaccaggattctcagagcatctattcttatttctctgtaagattttcatgtattctacctcatagtctggtaattagaaacctttcctattccaactccaagcttgtaaacctcttgggagcaaagtatctaacttctaccttctccagagagtgctgacgtcaggcccttactgggtagaggattcggagaagacgatggcaccccactccagtactcttgcctggaaaatcccatggatggaggagcctggtgaactgcagtccatggggtcgcgaagagtcagacacgactgagcgacttcactttcactcttcactttcatgcattggagaagaaaatgggaacccactccagtgttcttgcctggacaatcccagggacaggggagcctggtgggctgccatgtgtggggtcgcacagagtgggacacgactaaagcgacttagcagcagcagcagggtggaggattatttaaggttgtgtgacttgtgaatggcagggctggaaacagaactcaggcttccttatggctgtgcccctctagcgccccttcatcccactgccgtgtcagttatccattgctgcgcagcaaaccaccgtaaaccccactcctcaaagcagcgttgctactgctcacgggttttcaggccaggcatgcagacggctgggttgggctgctcttctgcgccgcctgctgggttactcacttggctagcttcagatgggctgggctgaaaggtccaggaagacatcactcacgtgtctagaacctccttgtgtctcctgtggccactttctctccatatggtgtctcctcttgttcattgtcatagcctgaacttcttcacaactactatggtagctgccttcctctagtgaaagcagaaggaagcagaagttggcaggcttctgatacagtgtgccttctgctgcattctctggatcaaggcaagtgacgggacagccgggatttgtggggaagggaagtagaccccacctcttgatgagcagaacagcgtgtacctcaaggaaggaatggatggtggccatcttcagagacaatcacgaccaaggttaaccaacagatgtagcgttctttcttggtttcctgtggggtcctgagcgaacagggaagctcaagtttgtgcagacccaaaggagaaaaaggaaaagaaaagcgccctgcaacagctacccgaggccacagtcctcattccctggctgagctcctggttgctttgtctttacttgagtatcagaagagaggccgttgtgcttggtgggatgtacagggtacattgggatgtactttacaggatggtgaagtacagggttcaagcttgggccatcctacagtgggcattcacaataatttgtttttagagcaactgctgtgtctgttttctgcatcaggcatttgaatgcatgttcctaagggttcaccttccaggcagccagtaaaaacagtgtttttaggtgctgtgtatgtgtgtagctaacacgtggtatacctacaagtcatcctttcagccattaatttccatctgtgtgtcaggttgtattcagtctcttaagaagaagcatgtcttgggaggtttctctccactttgtttcgacaacagaggattctcatttggagagataagtgcctgaccctggaaaaccaatctgccagccttgtccagctctggcaacgtcctttctttgtattccaactaacttggtttaaatgtcttacattatgagaattattctcttctctgagaaaaactcccttaatcttctaaatttccttgggaaatttttcacatgcattactttttttcttaaaaaaagcaaaagctccaggctttatctgtttgttacagttagattatctttccgccatttagataattatcccacccagagtatttttccctagaaacaatcaaataaataaaatcctctagtactctaccaagagaggggatgtaagagcggctgtgggggcaaaactttcccaagtgctttgggaaatctcgtgttttaagagattatcgtggtctagaaaatgaagagatttgttttaaacggaaatttctggtttctcaaacgtgtatgagaaaatgtaatggttttgtaccaactgtctagggagttgggtccaccaaagtcccattgactctcaatttgtgtggctcaaaagttattgaaggtattttatgtacttttttaatataagtgtgtatgggtaaacatttacacatggcacggagcaagcattcaattaaaagtccagagttgttgtgaatctcattttactcctcctctgtctcattggcggtggcggcgctgggtttgatgttcatttgcctcctctgtctcactggcggtggaggtggtgggtttgctcttgttcatttgttgcttcctttgttttgtctaggactaaaatgacatggatggcggctctttaaaacagtccagaccttttggaggactttggggattttctttgatttttgttttcattttcggatctttgcccccttcattttaggaagaagaattagaagcccaaatttccttccttcagggacagctgaatgacctggaggccatgtgcaaatactgtgcgaaggcgatggacacgcatcttggtgagtgcgggctccggccctgggaatggcagcagcaccggccacggatgcctagtgcttcccgtgagttacctcatgtcaccctcgcagacaaggaaaccagagcgcagagattaatcaaatttcccaaattataacactggtcagtggagcagaaattcagaatcaagcagtctaactccagatttcagctcttaatggctacactgccctttctaagtatctctctaacctcaaacagacaatcacggagctttcgaggtcaagcagtcagctctgctgctgtgctgatctgcctgtaatcactcatgtggtggtttgggcagtgctttctttatttttttaatatatctctttttaatcacctgtctgaaatgcatgtcgggacctcttcttccttctgactgtgccggtattctaagaagtgtcctcgtgtgcccttcaggttacacgtgagcggcctgtgtcacgccatggagtcctgggccttacttgctacattcgtgaaagttctgtgttttgtgttagaaaaagtctctactgttagaaaaggtctctacctccgatttgcttcaggaactccctgctgcttacaaaacgtttagactccacactgtgaccgttctcagcccactctcgggcatcctttccctccgtcctccggggtctagcatcgtagttcgggaggaagttagggagatcagacacatgctctcctggacgtgccagtctgctgttctgtgagtgtggggcctcgtgaggagccggaacacactgcccctgtgagggcgcaccagagaaccaccaagtgcccttctctctagcggggtccccagcggggcccgtctcggggccttcactggagacagactgtacatcacactccgtccgctgcccagcctgccaggcaatgagtccattacatgcggccaaaatggcttcgttcggacgcagcccacacgcactggcctcgagccagtaacgagggatctcttacaagcttggaaacgcacgtggcccgcatggccgactgcctccccacgtctccccgggagcgtcccggccctgctctgccctcggcttccctccatcctccagggagagggcgccggaggaggagatagcgggagaaaccctaaaggcgggtcccttcacatccagtccccaccactccaaaactgttcgtacacttcttcacagacaactttttaaattcagatagaattaattttacacaaatcttacagcatcgcagttcaaggtgcatcagagagaaataatgaagaggtagtttataaataactgatgtatagtccataattctttatgtacagagcaggagctggcatttttcatgactttttttttttaatatatgtagctgttgagttcagttcagtcactcagtcgtgtccgactctctgcaaccccatgaatcgcagcatgccaggcctccctgtccatcaccagctcccggagttcacccagactcacatccatcgagtccgtgatgccatccagccatctcatccttggtcgtccccttctcctcctgcccccaatccctcccagcatcagagtcttttccagtgagtcaactcttcgcatgaggtggccaaagtactggagcttcagctttagcatcattccctccaaagaaatcccagggctgatctccttcagaatggactggttggatctccttgcagtccaagggactctcaagagtcttctccaacaccacagttcaaacatcaattcttcagcgctcagccttcttcacagtccaactctcacatccatacatgaacagctacataattaaaaaaaaagagtcggacatgactgagtgactgaactgaactgatattgcatagttaattttattatttaaatacaagtttaattttaaagtaaccatgagtatatgtgtgtgtgcacacactgtaatttttgcttctctggctatgtggtgacctttgtgttactcaatttttgggttttgaccaaagtagaagaacaaagaagtgactgtaaatatttactgtaggagctctagaaaaatccagtagtgggatgtttccaggttgtttggtccacatagcagcttttaaagcagctttatttaagcctcaggatttccaaacagcttttactcttttagtcagcactaaaagaacatttttctcgttgcatgggatagagaagcactttttaattaaagaaaagcccttatcagctgtgaattttcagctaaccacaaaagcagatttgttttgtgtatatgtttcactttcagccagaatcccttcacacggctgttgacttctctttgctgtaaaagtagcctgactgcatgttctggggccctgactgccctggggcctatggattcattccatttcatccgcgtatgtaatgctttaccacagggtgttcctggattgtaggcagtttggattttaagcagaaatttgcggaaagcataaaggttgaggtgtgaagctctcaatttagttttttacttattatatcctttaaaaatgactttaatacgctcatatttttctccatataaacttttctatttttcctggttagtaaagtagtacagcagttgaaactgaaaaatccactagtaagtgattgattatagtatagtaatgcagtctttataaaggttaaaatacataagcataaagagatgttcataatgtattatgaagtgaaaatagcaggtggcacagtagaacatatttgatgtagaaataaccattgactgtggtggcctgagtgaggaagagcacagagggactttccaaggggctagccttcgtctctgcttggaaaacctgcgggtgcctcaagtgcatgtaactggcaccgtgggggtggtctgcatgctgcaggcacgagtcccctctgagacacctgccgggattcccctgaaggtccgctggtgacgactcagcactgccactgccgggggcgtgggttcagtccctgggcagggaactgagatcctgcatgctatgggcagagcaaaaaaaaaagcagctgcagtgatacctaagcaggagagacaggctcacaagcatcatacaaacacggggtcgaaaccagactccgtcacttctgagatcagcctgcttgtgactgtacataaaatgggtttgccaagatctatcccacccgttcattgccaagactaagacattcttaaagcctcgcacaaggccttccctggtagccagcggttaagaatctgccttcagtgcaggggatgcaggttcaatcttaggtcagggactaagatcccacatgccacggggcagctaagcctgcacactagggaacccgagtgtcagcacggatgatcctgcctgtcgcaactaggacccggtgaagccacgcctaaaaaataaatcaagccagcactggttgagtgtgcaacacaaatcctctccttcctcttggctattttttttttttaatctaaagtctttgttgaatttgttacactgttgcttccattttatgttttgattttttggccccaaggcctgaccaaggatcagacttacaccccctgccctggaaggtaaagcctgagccgttggaccagcagggaagtccccttcccctcaactcctagctgtcccttctatgtggccgatcccgcgaccagaggagctgagcagtgactggttggggtcccacggctggacagcgagagctgggagcagccctgttgaatgtccctcagtcagaccacgtgcagagatgctggggttggatctgcagggcctcacgttagatgtgtgagctctctgagcaagaacagctcacccagaactgcatggcgcctttgctcccctcagcaaaagccctgctgagcctggccgcccgctcccaaggggtccgaggtggcctcagattctcatcccacccctgcccttttctgacgttaagtattttcattgagttcctctcaaggaaattccgtatcagtctatgttatcatcagacctgcagtgatatcttaaaatgtcaagtacagttcaagactatctttttaacaaaacagatacagagaaaagcatctcagttaaaattttcagaaaggcatttgtttaaatggccctttaattacagaagtaataaaactgactcattaccagttttatttccttatggttctaggacccaaaactgaaagcattatttgttttatcaaaaatctaccaaaattctcattttattgcctccacataattgagctttgtcaattcaaagatttagagacaggaattgaaaaagtgtatttattaaatctaaacttttccatcaacttgacaagactttcttcaggtgttcatttgtctgttgctatagtcacacccctccctgtcatcctgacaattgacagcgtgcacctcggtggctgagttgggctgtttttaggcttgccgtcgctcacacatgattgcacgtgggtgagctgcctgcacttctctgatctgtgagcagctgggcctgcccccaggggaggggtctccagcctcgggttggtattaaacagtggagggtgaaatgcaatgaattaaggggagttagagctatgcagcccagcggatctcagaccgttgtcgagatgaacaccctccaggccctcacggctgttgctcgtttcacagacgaggaaaccgaaatgtgaggcctgggccggacgagggacacagagctcgctggcgcaggcgcccagggcctgtcccaggtctcggccgctcttcctgcgctcctgcggaggcccagctccagtcaggagccagacttcgggtctgcggtcttagcgcacacctccgcgccgattttgcacctgtcgtaataattatgcaagaattagcagtacgaggaggtcatttttgaaaattagtttatttgcctctgcaagagctttatgaatctgatttgctgatatttagcaaaatagcattcagtagatgtttttgaaagtgttcaacaggcaattaactagtgacatctgagagagaaggaaactgaccatcaggcagctctccctctgccaaccacacggtgctgaaagctctctgtaattattaagaatatgaaactttgcatttaagtgcaggatgagatctacttctcctgagggtctgtcagcagatcctgacttgaaagtctgaaggtctgcacttccagcagcccccagggcacgtggtgacactgacccgtgacagacaccaagcagcaggcagcgagagaacttaaggtcactggggcaaaatgcagttcacgtgttcctaacactgttagtgggtccctaccccgccctgcaggcacacgtgcgggaaccctgtgggaggagtgcccccccacccccgccacgatctgaggcagcctgcgcacaccgaacaccagcgctgtgctcagcctcttcctgccctgctctctcctcgtggaaggcgtttctccccagatttgattatctgaagctttggaagcgtatttcttgcaacaaccttatgtatgctaggtcacttcagtcttggcgaccctctgcgaccctagggactacagcctgccagactcctctgtccatgggatcctccaggcaagaatactggagtgggttgccatgctctcctccagggcatcttcccgacccagggatcgaacctgggtctcctgtggctcctgcattgcaagcggattcttgcaatgagccacccaggaagcctataccaaccctacacttactaagaaaaactcggcaaactacatgctgtcttagcctttcgtgggctccgagaacagccccctgatcacatggtctcagtacggacggttcctctttcatcgttttgttttcatttcatggctctcaccatcttcccacctgcttttccaaactgagtatctttcactgtctttttctcttttttaaatataattcccagatcctttatctttttttaagtagcttatttaattggtggctaattattccacagtactgtggtggtttttgccatactctgacatgaatcagccacgggtgtgcatatgagcccccatcctgagccccccgccgctttatctttctaaactgtgtctgatcgcctaacctgtttccccaccgccacaccaggctgcttttccacttcctctaaccccagcctgtccagctcatgacccagggggcaaaagacttgtctaccgcatcccctacctcagcagaaacagtcctgccaccaaaagccccaaggttcaagggccttgtggctcacgctgaacctaagagcttgtgagtgggggcaggtggggcctgcaatgagcagctgagcaccaccgccgcagccgtgtccagctcccagctgagcagcagcacttaactgtccacaagtcatcggctgggcaaactcttgtggcctgagagtctcaaagaatatgtccatcttaagcagttgtgagggtcttatttgactaagtgatgtaattttaagataaccttagccagacttctatctagttgctcacaagtgagaggggatggtggtgaaaaccccaggctgtttcctattagtgaggtccttgctgtttttctgcttttatttttagaaatacatgttcttccaaaggcatctaaccattactggagctgagagaccttctaagttgaaaaatatatgcagcgtctctcctagtggacttgaaggtagcagccgtatcatgaacaggatagattttaccctgagaagccgtgctccatgctgggctcttggcttgcaggcaggtaaatcctaagagaagaatccagaatctgttgagatccgtgcaggtttggaaccctgagctgagcacactcagttcacttagaactcctcattgacctgaagactcgtaatgcacgtattgctgtagtcttcgcttgggtttcctaagtgctgcccctcttccagtgctgagtgtacagtcttcagccattctgggagctggatgcgagtaggaccctcgactctattttctgggtgatcttggtgacagacaccaagcagcaaggagcaagagaacttaagatcattggggcaaaatgcagttcgtgtgttgctaacgctgttagtgggtccccacccccgccccgcaggcacacgtgcgggaaccctgtgggaggagtgcccccccacccccgccaccatctgaggcggcctgcgcacaccaagcaccggcgctgcgctcagcctcttcctgccctgctctctcctcgtggaaggcgtttctccccagatttgattatctggggagataagataatcaagaaaagactgcagaccgtcactagccacactcccttcgcccgcccctcagtccaggacgcctgtgatcacgttcaagtcccttcattcttcatccggaaaatatctcacccgcgtctattcctcaagagagagaaccagccctcatgccggctggagagcctcatcttggccattcagccagtatttcctcagtacctgcccttggatgtgaaaacgggtttggggagcagttggttgggggtggagtgaaatggaggagtgcctttaaagtcaagctcaaggtgaatggaagaggagagcaaagcttcagagtaggaagagagcacagagactgtatacctcgttagcagtaccagaggtgacacgtggctccagggaagccagcagtgcccccggagcaccagcggtctgaggcattgggggctggcgctctaagtccagggtgcagtgagcaggcctgtctgcaacagaagaccaggatgtgccgtgcagaaccgggcggtttcgggggacttttgtcgtggggcctcgtctctgagcagcagcgacagttgtgaaggataagcaggacagggcccagcgagtggtccttgcagagggaggcccagtgcgtgaacgggttatattgatagactgttatattgatgagatttgtgtggaatttccacagaaatggttaattttacgaatttttttcccccttttatttcagtgtcccaacatctgtaatgggtaatgcttaaatataaggagattataaagaacataatcttacttcttcacagaaacaaaaggaaagagcctttatatcatcatttattctgcctcttactagaaggaaaaacgtctgcattactttgaaaattttaaacatttcacatttctgcctttaatattatgaggtatggaaagatactatgtttttccttttttacacacagatttgacttaaagtcgtgcattagtgactaagaagttgtatattaatgaaacagttgtgaacactgccttgaatcactgtgtggtggaactggctaggcaaaggctttaagcggtcagtagtttgtgagttaaataaaaatgtttgcattcagggcatttagcagcctctgaaggtaatctgtttggacttggatttctaaaccctgaattgcttatgtgcagctagtcagctcagtttattagagctgaggtttagccttaagttgatggagaaggcaatagcaacctgctcccgtagccttgctgagatcgtcccttggacagaggagcctggcgggctacagtccttggggctgcaaagagttggacgtgacggagctactgagcacgcagcctgaacatgaagtgcacgttttatgtctgtgtcggctttcggggagaagatcttcgtttccgtcagcttctaaaaggtgaacgctgaatccaggaagccgggcggcaggccctgctgaggacaccgcgctcgggctcctctcctcggggtgcgccctgcccgcggccccttccgtgagagggcccgggcgatctgcccggggccgggcggtgtggctgctgtacgaggccgagggcgtcccacccagttctcatccacccgcgtccgtgccggtgaccttctgtggaagtggggtctggacagacgtcctcacgctgggaggacggcaggagggagcacctccaggcacccgagggcagcgcgcccgcaccgcggctctgacgcggccctccgccgcgagtgcgcgttcccgcgttccccgcgttttcagccacagcgcttgtccgttagcttctggtccattaacccccaagacaatagacacaccgggaagctatttatgaattcttcttaaagcagagcagcccagaggcaggcagtgcgaacaggtgctgtggccgcggccccgggccgccgtccttgggctcgtgaggggaccctcggggctcctgctgccttccaggggcccgcgggcagcggaggccgcaaaggcacagagtcagcccccggggcgccttccagagcctcctggggcttccctcacggtgcgggccacggctgtcaggaccacccggggccgggggcatggaggcctctgcgaggggctggggggtgcccaccagcgcgcgccggcctgagactccagagacggcggccgtgaggtcggcggcggagaacacgggaagcggaggccctgaggagcaggggggcttcccacggaggccgatggaccagaggcttgggctgctctggctccttacccaccgctgcccagccccggcctctgctttcccgccagcgccgccactgctccctgaagtcctggggcttctgggagtctgccagcaaggcggggcgtcccgggggcggggcacggtggggcggggcggggcgccccgggggcggggcagggcgtcccgggggcggggcggggcggggcggggcgtcccgggggcggggcggggctccttgtccatggagtcttggtcccgcgtggccagcaggaggtggtgagacctcagctctgagtgggagagtcagtctacacactcactcagatgtgcgaaactcttgctccgaagttccattcccagcagtggcagcccgaggcctaactctgccggttaaaggcagacttgcttcttcactggtcgcccgtctcgtctggaccgaggcccacagctagtttctccgccctgtctcctcgcctcgcccggggggctcaggactccggggtctcccttgtctccgttgttggaggaagggcctctgagtgccctccggtccctgctggcctctgcggacggctctgtccccgccagagcctctgactgccctgtcggcttggagcctcggccctgaaggccttcggtccttagtgcttcggccgtggatcccagcacgttgaaggcaggaacaggcgctgtggccgagcctttggcttcaggcggtgctcccagcagaccgtccaggaggcagcaggaggtagcaggaggtcacggggcaagcaggatgcgcagggcgcttgctgtccacagtcacctctcttcctggcccccggagctacacgtgggctccacgggcctccctccgctagatcctcaggcacgagacccctgggcttcctgccgaggccctggagcccccacacctaccggccgggctccctgccacccctgggggcagagccctgcgccctcgctgctcagcaggccaaacctctgcctttccaggcagccctccacctcccagctcatccctaaaagcccaggcagagtcatcaacacaaaggcagccttttcagtcctccccgagacctacagaactgcctcggcaatgtctgcatttggtttaatgtcttgttgaatggattttgtgtgtgtgtgtgtttgttttattgagagagaacaaattgttacaggcttttaaggagaccaaaaacattcagtctctaattatatctattatcccatttctattcatcttgctttcttgttttgaagtgggcctaatagccagaaactccagtcacattctgaataaattcaggctgctgtttttctgctgttgtctgtaagaggacttgtcagcatggtctgtagatttattcttggtgaagattctaataaactgtcaggctggacttatgttgatgggacttagtcttcatctcaccccttgctggaaatactttttggaagaaaaactatgaaaaacctagatcacatattaaaaagtagagacattacttggtcagcaaaggtccatctagtcaaagctgtggcttttcaagtagtcatgtatggatgtgagagttggaccataaagaaagctgagagctgaagaattgatgcttttgaactgtggagttggcaaagactcttgagagtccgttgaactgcaaggaaatgcaaccagtccatcccaaaggagatcagtcctgagtgttcattggaaggactgatgctgaagctgaaactctagtactttggccacctgatgcgaagagctgactcattgggaaagaccctgatgctgggaagattgaaggtaggaggagaaggggacgacagatgatgagatggttggatggcatcacccactcaatggacatgagtctgagtatctccgggagttggtgatggacagggaagcctgccatgctgcagtccgtggggtcgcacagagtcggacacgcctgagcaactgcacagcaacaacaaggactgcagtatttcaaaatgcaggttccgagggtgtttttccatggttgttgagtcagtcactactcactgtgcccctgaagtttgccagctatcctgctgagggctaggtgtacccctgagccagaccccgccaggggtgacagccgaccgataagccagcgtctggtatgacagtgctttcgtcagcgccatagaggagctgaagccggggccccgagggtggcctgggcacacagtctgggtgggcaggaaggccgctcccaggaggatgcaggagagctgaggatggagctcccaggcccaggcaggctgagtgctgcccccgctctcctgggcgccagaggctgaggggccaggcccggagcggagcctcggacagcatgaccgagtgcagggccgagagtcaggctcacaggccgagtcactgggctcctggtatggccccaggaagggagggagcagtttagtggagggtgagcctcttcctgcacgggttctcggcttggtgctcggacggtgtcattgtaaagacgtgttttaattgctgcccccaaccaagatggagaaggacatggcaactcactccaatgttcttgcctagagaatcccagggacgggggagcctggtgggctgctgtcaatggggtcgcacagagtcagacacgcctgaagcgaattagcagcaacagcccaaccaagagtctccagaggagcgctgtggggtgcggggcactttcactcgtgcaccccctctttaagaaccccctccccagaagcacaggcccagcagcgctgggggctcaggcacgccgtgtggaaggccacgacctttgctcgctgaagctcttggtgagcagctcagcgtgacgccagtgctcagagctggctcagcgggtcttcaggtcaagtctgcatgaaggccaggcctcacgcagacacagagagacagctccggtgagggggttaagtcttgctgactccacaggcatcgctatctggcgacaaccacagtgccgtgggtttgcccttttctttttaccactatgtcgaactgacaacgtacttcacatttatattttttaaagattgttgttgttcagttgctaagtcgtgtccaactctttgtggccccatggactgcaacacgccaggcctccctgtccatcaccaactccaagagtttactcaaacccatgcccatcgcgtcagtgatgccatccagccatctcatcctctgccatccccttctccccctgccttcaatctttcccagcgtcagagtcttctccagtgagttggctcttcgcatcaggtggccaaagtattggagcttcagcttcagcatcattccttccaatgaatgttcaggcttaatttcctttaggatggactggttggatctccttgcattcccaggggctctcaagagtcttctccaccaccacagttcaaaagcatcaattcttccacactcggccttctttatggcccaactgtcacatccatactactggaagaaccatatatggacccttggtcagcaaagtgatgtctctgctttttaatacactaagtttgtcataacttttcttccaaggggcaagcgtcttttaattgcatggctgcagtcagtgtctgcagtgattttggagcccagaaaataaaatctgccactgtttccactgttttagatagtttctttaacttcccaccaggaggacctggtctttagccagaggggtgaattaacagcactgaaccctggtaagtgtagggagcctcgcggagacgtcgggtgaatgctctgtgctgtccaccctgtctcaggtcagcaagggcagctctgggctctcagcggaagacactcctgtcactgtgagaacacgttcatgggacattggtgggaggctctgtgtcccaggttctgtgccccctctcctgtacccggcccctgccccgtgtctggttgggcagagcatccttgctagaaagagttgctgtgcagtgtggcagaggaattccctgactggtctaaagtgatggtgcggcagcagataaattacactcagggcattagttataaaatgtcattcttttatttttcagtaaatattcaagatgtgatattacaggaaaatttggaaaaggaggatcagattctggtttccctggccggactaaagcaggtatgtccgttcacctgacctggtgtcacccaggccagcctttcgtgcctgtcatggggggagggcaccccgggcccggacgccctgcccgcattgccttccacacggacccctcctgcgtggcccggctcctcccagcagtcacatctgagcagcccgcagccaggctggtcctcagtccccctgcccccaacctctcaccccttcctctccgacgctgctgcggagggtgtgttccgctcaagtccagtcatgcccctgtagacgcgtggacgtcctgggagcacaaggcccaaagaatctcctctaagcagcctgggcccctcgagggtcgtacttggtggacagaagagcagcaacgtccgtgaaggggtgcaggctctcaccgtcagcccacctgacgccctcagccaggcgggcccccccacccccggagccgagggcgctccctgggccgcggtggatgcggggtgtctcccgctccaggaggaccccagagattgccccacacctgtccctgtgcaggcctggccgtgcaggctgggacggctcagtgtcatccataaggcagagctcagtgtttctttgttctttcttccggttgtatattcatacgcacatcagagaagaccgctcaggggacctccctggcggcccagcagttaggactccgtgcctccactgcaggggccacaggttcagtccctggtcagggaactgagaccccacaagcctcaaggtacagcaaaaaaaaccaagactggtcagcggagttggggtcagatgtgcccgaggtttaggtgacgcttggaggcagacccgttggtctttctcatggatcgtcttctttgaaatcagatcaaagacatcctgaagggctccctgcgtttcaatcagagccagctggaggccgaggacaatgagcagatcagcatcgcagacgaccactactgctccggtggcgccgcccagcaggtactaccacgggctcccagggcggggcaggccgccctgggggcgctcaccgcgggaggggcgagagccccggaaccgcacatggggggtaccgcacacagctgtgcggggtgtggactcggggcggcgccatccgctgtggactggcggctcccacccttgggcagcagcttcagcctgggcttctgccgcccgttaggaagcccggaaagctggctctctgcctgtttccggcttggctgcagccctggcctcccttccccttcagcagggggagtgccgacccttcttccccatctcgagtgtacttcacttggccggaaggtttttggccttcaaggggagggacttctcagagtccatcaccctgtaagccacgtgggtcagggaacgttttctgtgaaggcccagggagtgaatattttagcaaaatctcatccaagttaccttctcaaaaagtagcatccggatgcttacaagctgtattttttgtgtgattttaaagaagcagaaaggtattttcaagtggggctccgtcagctttgagcgctctcccagcagagcgccctctgaggcccttctcgcagctccgtgctctttggcagaggccctccgggatgagcggctgccagtgacgggactgcaggcgggtcagcctgtgcccagacgtctgcccggcgcccaggatcgggcgaggcccaggccgggccccgggggcgggggaaggggttagacccagacccctcgcaggagccccgtgcccgcgggaggacccagggcccgcccagcgccccctcaccgcgccccctccggccctgacccctttgcaggccccgccagcagccccgtgtcgcccggagcggccgggcgcggacgacttcgtcctggtctccaaggacggcgaggagcgcggcgccgggccgagccccgcgggccaggcccagccgctgcggccgctccggggcgccgcccggccgctgcttgtgttctccgacccgctgaccggcccggcctccgcctcgtccagcaaccccagctccagccccgacgacgacagcagcggccacagcaaagactcgggcttcaccatcgtgagccccctggacctctgacggccgccggccaccccgctgccgcggagacgcccctgcgcgcgcgccggctgccgccctcggggcagcgcccacctctcctccgcactcccgggcctccagcttcccctggggcgccggccgggccgctgcgcgcagcagggctccagcggtctccagcctcagaccccacggaccggctgtcagcgcccctcctcggacagcccagacagccgtcggaaacggaggccgcgagcgccgcgccggcctcgctgcgcgccccgctggcgccccttgcagcagggcctctaggagcagggcagctcccgggaggccccgctttcccctgttgcttggctcatccctttgaagagaaggtcaaaagagggttgacctttgcagtgtggaagtccggactgaccctcagctgggtcactcccccgccagactctgtgagcgcaggcagcacgcttcgccgcttttgtccgcagcctctgcgtctgggaaaggaaggtcagatg

SEQ ID NO: 248 - DNA, 52171 bp, Hippotragus leucophaeus
  source 1..52171: mol_type = genomic DNA
actgaactgactgaacccaataaagattttaggatcgtgcttggtatatagtcaccactcaatgagtgcctttcaaagattctaaattgcattcttatttttcgcactttaacatgtctagaatggagatgtggcccaaacaaaggcttcttagaatggatacaggatagtattgttattttcgataggttctagtttgagggacaattcctcttcaccgccaactgctcaatccattcctggatccatgagtttccttttcgaactttgtaacctctcccacttctcaggcgagccctttacaggcctctcctggctacgtaattttttagctgcgcggcttcctcagccaatacggtaggcggcggaagcactcgagagcttacggcggcgcggcacccaagcggccgaaggagccggagcgaaacccaactggtccccgcccgcccgcagtcagctgatgggccgaccgtcgcggagaccgccgccgccgctcgaacatggcggccgagattcactccaggccgcagagcagccgcccggtgctgctgagcaagatcgaggggcaccaggacgccgtcacggccgcactgcttatccccaaggaggacggagtgatcacggccagcgaggacaggtagggccggcggctggtgcgcggcggggccgaggcgcgacgagggcggcccggattccaccggcgcccgggtgtgggggccgtgggggtcgccagccttggccctctccgcgtgggggcgtccacggtccccgggtcccgcggcccgtcgccccccaccggcccgtcttggtcgccgggaccccctccctcgcgttcccgcctgtggggtcctccagtctcgccccgccgccgcgcctctctggttccagacgccagtacgtggttcgcacctcccggtccgggacacctgtcccagcccccggccactgcgctccccccagcccgagaccctcatccccgccgcgcccctccggtccgagaccccccacgggatgctcttcgagcccgggacccccgcccccctcaactctcctttgcccagagctggaagcgtcctctccgcggtccgttccaagccgccttctctgggagccaggactggcctccggttcccgcgggaccgggtgccagggaaccctttctttcaacaaacctccatgggcttcagcactcttctgccctacgctggggtttacacctctctttggcgctcaccacgtctccagatcagatacttttccaaagctgttagaaccacctgaatgttatttacaaaacaatgtttgttttccccccccaaaagtgactcacttaagaaaagactctaagaataataaaaatggcttttattttttaaagaaatttgatatttccactgttaatggaaaaccagttatcccttgctataaaaaaattgatgtctaaaacgttcatctctgtgcacctaaagtcagctcttgtcttgttaacagggcgtcttgcccatcatactttgggaaacactgatcagatgcgattttctcattctccccaagaggaaactgaggttcgtggaaagaaaggcacagagatactggtgacgccagaaatgcaccccaagattccccagtccagctctctggtctttccagggttttgcgattggttgggagagagattatttgtgttgtaactttagcgttttgtaagcccttaaaagtttcaaaggttagtggctttactgtgggaatttggaggaaatgactgatgtttttgagagaaactgtgtttccttgctgcagtgagtgttcttaaacggtggtattgcaaaagtggaaagtctttctggaagaaggaaggtccagctgttttgttaaagtgggaagcacagtacagccttttgtcgtctagtttttgaagtctgtagttttgagggcctgttcccattgagaagaggaaacccgaaacccccagagcctatttgacctttgtgttttgcttttgagtgagtttgttgtgagcaggcaatttacgagtaactgaccgccagcgaggtggagagtgattggttaaacgtggatgtgggtgtgtcaccaggaaggagtgggagactgcggggtgcctgagccacggggagaaattgttcttgttcagttgctaagtctcatgtccttctcaaggagaagaaggaactgcttaaaaaaaagacaaaggacagaataatgatatttgcatgatatgaacatagatggagacatcattttatacaagttagctgtctttgttcagtaaaatattttagtcatgactcatgtgtgttgggtaagttgctgagtatttgcgattactggccaggagcagtgttgatcaatgttttatggaaagtgattacttagctgctctgggactgaagtgttccgggagacactttcatgggggcacagcagggtcctggcagaggactggaccaggtgaggggttggggccttggatttctaatttgtgtttcaggcccatggaactttctgggaggcacgacactcgttgaagcaggttctgcactttatgagatttatgaaagcacatggctatgagttttttttttgttgttggatatggtggtttgttttcacattgtcataagtgtgtgtcatattcttcaatcgtttgtttattcactcatttatagatttagaaataatctccttgttgagtgccaggccctagacagaacaaggagcaaaagtcacagaacttgcccttatataacttctgattcatgattttatggcccctgacctgatagaaccagccaggaaatagaacactgaccaccatttatcatcaaacaagcatttattgggcacttactgtgtgccaggcctgtcttagatttgtgggtagaaaacacgagcactgaaattgatgttcccaaagggctggatggtgtggtgaagagatggccctgtgctctccactccctgggtgctggggagacacaggggaaggagggtccttgggtgagcgctgggtttcaaggaaagcctcctgggagagataacactagtggaaggagtggtctctgtgaccctggtccaggcagagggaaatcgcaggagggagtcgcaggtggtacagaaccatggttatttccagatgcccagagcagaaagtgtactgagagctggaaggcccagtgtccagttatagaaggatcttccttgtgtgccactgttaaaatttggacttcagtttgcgagcagtgggagaccatcaaagagtttaaagcaagcaaatgataccgtcagaatgtgtacttgaaatccttctttatttcaaaatatttatgcatttacttggcacgaaggggtcttagttgcatcatgtgtgtgcttggtcagtctgccatgtccgactctttgtgaccccatgcaccgtagccgcctggcccctttgtccctgggattgtccacgtaagaacattggagtgggctgccatttcctcctccaaggaattttcccgtcctagggatctaacctgcatctcttgcttctcctgcattggcaggcggattctttaccactgcacctcctggaaagcccctgtagcatgtgagttctttttagttgcggcatgtgggatctagctccctgaccggggatccaacccaggcccactgtattgggagtgtggcgtcttagccactggaccaccagggaagtcccccagaatttgaactttaaaaattgccttgtctgactttaaaaatagcaatagttaacgttttaaaagtcccctccctctttcagtagagaattggaccagtgtatgtgagtgcatccagttctcacatctccccatgagatggtttcaatcactttctcttatcgacagttccaaatttcaaggtattgtaaaagtcagaggtgtttttgtttgtttttgcgagttaggcctgaaaactcattggtgctaaaacttgacctccatagatgagagtgtttgtaatctttatcccatgtggcatgaatattcatttgttttactgcagagagatcagtgcattttattgtgggtcctactgggagtcttatggaccctgtagtgtaggtgtcttattgcaatgggcatttggccatttagaaaactggggtgcgaggggcactgaagtaactgttaattcccaaggtcacattgccagtaaatgatgggaatgagatttgaacccaggtctaactctgaggccctagttctttctgctgtgcacctagtcctacacgtttggagaacctgagttgaggcagtgtcagtggtggacgactccagcaacaagtgtaaaatgctaggattctgccttttgttcccccacccccccgggggagggacgtttggcaatatctggagatattttggttgtcataactgggggaggttactcctggaatctagcgggtagaggatgttgaacatcctgtaacacgcaggacagtccctcatgaaaaggattgtccagctccaaatgtcattaatgccgagttggagaaaccctcgtctaggcttaatgtacttgtttgtctgatttgcctagatagtggttctcagagcttgcatgtgcatcagggtcgcgtggagagggatcttgttaaagcacaaagatcctggttcagtaagtgggactgggccccagagtttgcctttctgtcacgttcccagtgatgtccatgctgatgctgctggtcacacttggagggccattgctttacgcagaagagaattattcatcgtgcttgtctgtggagaggcactgggaaagaatactgtttatactttgtcctcttttttttttttttttggtcagtttatgggatgtatttgcctggagccatttatatatacccatctttttcctagtaaatctgaactatatctggcagtgctaagtacagagaattcccccaaggagtaataaacgaatatggaggattcagcttaattccatgggacctggagtcactgctaatggtttggggagcaagtttaggggtctgatcagaaaccttcagggattactgtgccctgaagggttaacagagaatggtgctgctctttaacgtgcattcacttgtattttgttggggcttcccaagtggctcagtgataaaagaatctgcctgccaatgcaggagatgcgggttcaacccctgggtcaggaagatcccctgaggaggaaatggcaacccactccagtatgattgcctgggaaatcccatggacagaggagcttggtgagctacagtccatggggtggaacgagttggacacatctgaatgactacgcacacacacacacacaaattcctttgtttaagcttcgttctttatgaaaccttagtatttttaaattttagttttcagttgcacgttggaactagaatatctgagcatgcagcgtagaaaaacgatacactggtaaagtaaaaaaaagatattcttgagtcagtggagtatgactgtctttctagtcaggaaactgtaaaaataaaagtaataacctcagtgttatgtttcagaatttaactgcagcagtcattttcctggtcggagaaacagaaaatgagactgtactttcaggacagaactgaaatgttgtgaggcaacaggaaatgattccctggacacgtttgctttctgaacttctttgagttgcaccaaaaatttagacagttggttagaaaaggagagatagcatttttttaaaggtaaaatcttactaaaagtcttaccagtaagttaaggctatgggctagctatcttcaattttgaaaactagagtttgaagagatgcctgctgatactactgtttcaggggcctaaagatcaaggttgatttctgcaagaaattgttttgtctggcctaagtcaaacaaagagagattgcgtatattttaagatatttaggatgttgcacttaggctggtaagcaatagagatcacagaagactaacttttaaaatatttttggtagcatcttccttttttcctcccccccaaaaaaacatttccccctaataaacattagctgtttatttttttgttttcttttagacatttctaagcatattaagatggtttgaaggaaagctgtatatttagtagctgtttcacagaaacaatgctaaataaacaagcaacttgatttttaagtgttatccttgggaggaaacctggtatagctggaagttttcagtttatacagaaaaccagaatgttaactgctgtatttttgttgtcttacagtgcctaaaaatagactttcatttgtgttacaaaataaagtgaagaagtgagatgtcggaagcctgcgtaggaaagcatctattgctgtgtcgttaggagtggattttcattgttaagatcattttcttttatagtatagtttagaacagattctgaatcttgaatgcctgagtttgaatcctagccatgtgaccttgggtaggttacttttgtctcccagtgttgtagttttgtcatctgtaaaatggagataataaaggctccagcctcctaattgtgggaattagatgaattaacatgtaaagcactttgaacggtacctggcacagagaaggcacttcatgtgtgttggctattattattttcattcccatttattttgcacttaattgctgtaatctcatcagaagctaagcatgtctttgcttactgtgacttttgagtgcgcatgtgcatgcgtgctcagttgtgtctgactctctgcggccctgtgaactgtagcccgccgtgctcctctgtccatggggttctctgggcaagaatcctccagtgggttgccgtttcctcctccaggggatcttcctgacccaaggaccaaagccgcatctctggcgtctcctgcattgcaggtgtattctttaccactgagccacataggaagcccctggtatatgtgtgtgtgtgtaaataaagtgaaatttttcttgcctgaatagaatagtttcagagcaatagatgctttcctgcccaggcttccgacttctcacttcttcactttattttgtaacacaaatgaaagagtctatttttaggcactgcgagacaacaaaaatacagcagttaacattctggttttgtgtataaactgagaacttccactttgggggtcccttacagaccttataactgtctttgagtcatgccttttcagcatttccatatttggtcgcttacaagtcatttcagtcacatgttttcacttataaaagtccttgccctgcttgctgtataagggagccccctaaccactgccaggttccttgattcacgaggaggactgccatcgtgtggtcatcctcacggccacgatgtatttcagtggcaggacaggaaacaaaagtgatgaagggaaaggtatgggctgaagtccagaggaaaccaggcgtgagcttccaggagtcctggccctgtagagactctcaggagatgttccattcccccagccgggagttatcccacacgtgtgaaatactcacactggctacctccaagctggttagaggctcaagctacccaggctgtcactgggggatgttcctgaaggcagcctctgcctcacacgtgccggaatcccagactcccagaaggaaagcaggaggtcagtggtctctcaaatagtagttgtttttttttttttttaatttttttcccatatttatctggctgtgccggccttagttgcggcatgcaaactcttggttgtgggatgtggcatctagttccctgaccagggatcaaacccaggccctctgcatcgggagctcagaatcttaactcctggacccccagggaagtcgctcaaaccttagttagagaaaatcctcagtaaataaatctggaagaagcatggaccagaattgcaaaacagcctcactatctccaactgtttttcttttaagttcgtttgcccttgtatttcaagatttcaaggctgtgaggagtttggaacatttttttttttttttttaatttggaagttaatgttgcatggaccctacctggactgactccatcctctcctcctgctcctcagaggttgtaatagcttttaccctcacactggctcacagggtaaaatagcttttaccctcctgggtggcacagaggtcacaaaagataattttgaggctgacagtggaagcatagcaacaggcatggttcctcaagtcagaaagaaaacgtcttctcaggtggaagacccagccacccggcttgtggagccgttattctaatttaggggctggtgaaggtgcacatgtcctttgcccctgggtaaaagtctgccggtgacagaatcagcaatctgagggtccccatcatcatggacaggattccttccctagactgtagaaggggatggaaatttaaattttctaagccaatctgattttcctttattcaaaaaaggctagtttccctgcctttcagtttagttaattcagtaaaaatctagtgttttccccctttgttattcaaagaggaaggctgctttctgccgtagtaatgaatagggcagagttcaagagacgtggccggaaggaaactgctgtttatttgataaaagcagacagtaccattagggcttccctggtggctgattgttaaggaacccagctgacaatactggagagttgcatccctgggtagggaagatcccttggaggaggaaatggcaacccgttccagtattcttgcctgggaaatcctgtggacagaggagcctagtgggctacaatctatagggtcacaaaagagtgagacacaactgaagccactgaaacaacattgtaccatatcctttcctcctttcccttttaggccaacatcttagtgttgtatcagtagaaattgctcgggctatcagaattatgcatttttatccgtagccctggagatactgtcagactaggaaaacacatcctttgacgtaggtaacacaaatgtttggtcatttaccaaggtataaaatagcatcagcaatcctaggagcgactggaaaatcagattgatttccccaaacttactattttttcccaagtttaaaagaaatcaggcttggggcttaatttgtaacacatgctatattctgtatttttttacgccaattcaatgaataagccctgtatatcagtttacaatttaaagatgattaaattgttttaatttagctatttggggatgattaaggtgttttttggagagctttttgaaagagctggttttagaaatgctgatgtatcaggcaaggtagaatctgaccttgggattttatagaaacacctgtgtgctatttgaatctcatggccatgattttcaaagcaatcagaaaataatatgtactgaacccaaatgtatgttcttattgggcgatagatttgaaaatggtattaatcgtgacttgcacaaggtgcctctgggtttgagagccagtgcttttcaggaggaaaattatgctttaatctgtcttttctttgtgttgtagcatacgtaaatgagattttataaacttggtgatttccaaaagtatgtttttaacttgcttttgatcagttctttgacagagcgaaatcaaggggctagaaaagatcaaaggaacctttgttcctcatcaggagtatctgtgagcaggtgagatttatctgtatcagataaatctgtgagcaggtcacagatttatctccctggaataggtgcttctttcttaaacctgttggttttagtctgctttttatgtatttactctagtaaaggaacatacagaattattattcttgataggatgaaaaatactgagtaatatttaagagtaatatgttcatttgtgcttttgcataacttcaatttcttggaaataaaattagcatctgagcaaagtgaggatcctagagctcagttaaaagtaaaagtggacttaatgtgtttactgctgctgctaagtcacttcagttgtgtctgactttgtgcagccccctagacggcagcccaccaggctctgccgtccctgggattctccaggcaagaacacgagtgaattgccatttccatactctgaaattcttggcacttggtcaatgccaaatgctgtttttatttccatttttaaggtcagagtcctaattattcataaagatgtactacttggaacaggcggcattgtatcagttagctattgctgtgttgccggccatcgtgaaattcagaggcttaaaacaagaactgtcatcattgctcgtgagcctgtgattcccctggacagtccacctgctcacagccagacttgcttatacacgtgttggccctgctcatttcagccagtctctttcacggggcttgctggccacagactggtagaggatggtgtcacctgacacttggagctctcttccttgtggtccatcctctagcgggctaacccctcttcttcatgtagcctttactcaggcccagtacagagtcggcactgcattgctgcagccacgttctttgggccgaagcaagtcacagggcagtccatctccaaggttggagaaatagtttccacctcttgttgggaagaattgcaaagtcacattgtaaagcgtacacaagcagggagggataagaattgggctccttcttgtagtttaccaccccaagcatgtaaatatcatattggatactatagttgatcttaaggtactgagaaattttgttagaatcactgttcctgtttagcgcagaagttgggtgtttttttgtttttttttttaaccaagtgagagttttgaggttggacctagacttttccacattctgcatttatttggagaaaaaaggagtttaatgcttcctgttttcttgctgttgaggagtcactgctttggaggataaaatgtagaggtttctgaatgccctttagaaaattgttctgcgtattaattgccatatgaagagtctttactttggtattgtcctgaaatgtgaattttcatcaccttctggcagaataagtagacaggagtcagaaaatctgatccagtgctgctgtggcttgtttgatttgtagggctttctccctcctggcttctgcttccctaagtataaaacagatgtcttggctggcatctttgtcaggaggatgtggccaacatgtactcaacagaccacaacttttctagactcccaatgcagtagcaggcagaaggtgttgcctgtgccactggagttcttcactgtgaactttaagagttgagcacgtttctgcagttgttcttattgttgttcagttgtccagtgggtccgactctgtgtgacccatggactgcagcatgccaggcttccctgtccttcagcatatcccagacttggctcaaactcatgtccattgagtcagtgatgccatccaaccatctcatcctctctggtccccttctcctcctttcaatctttgccagcatcagaatcttttccagtgagttagctcttcgcatcaggtgaccaaagaattggagcttcagcttcagcatcagtccttccaatgaatattcagggctaatctcctttaggatgggctggttggatctccttgcagtccacgggactctcaagagtcttctccaacaccacagttcgaaagcatcaattcttcagcgctcagctttctttatagtccaactctcacatccatatgtgactactggaaaaaccatagctttgactagatggacctttgttggcaaagtcatgtctctgctttttaatatactgtctaggtttgtcatagctttttttccaaggagcaagcatcttttaatttcatggctgcagtcaccatctgccgtgattttggagcccaagaaaataaagtctgtcactgtttccactgtgtccccatctatttgccacgaagtgatcggattggatgccatgatcttttagttttttgaatgttgaattttaagccagctttttcactcttctcttttgctttcatcaagaggctcttgagttcttcactttctgccataagagtggtgtcatctgcatatctgaagatattaatatttttcctggcaatcttgattccagcttgtgcttcatccagcccggcatttcacatgatgtactctgcatataagttaaacaaacagggtgacaatatacagccttgacatactcctttcccagtttagaaccagtccattgttccatgtccggttctaactgtggcttcttgacctgcatacagatttctcaggaggcggttaaggtggtctggtatttccacctctttgagagttttccacagtttgttgtgatccacacagtcaaaagctttagcattgtcagtgaagcagaagtagatgtttttctggaattctctgcttttgctatgatccagcagaagttggaaatttgttctctggcttctctgccttttctaaatccaggttgaacatctggaggttcttggttcatgtactattgaagcctagcttggagaattttgagcattactttgctggcgtgtgagatgagtgcaattgtgcagtagtttgaacattgtttggcgttgtttttctttgggattggaatgaaaactgaccttttacagtcctgtgaccactgctgagtttcccaaatttgctggcatattgagtgcaacagcggcatcttttaggacttgaaatagctcagctggaattccatcaccttcactagctttgtttgtagtgatgcttcgtaagatccacttgacttcagattccaggatgtctggttccaggtgagtgatcacaccatcgtggctatctggttcattaagatctttttttgtatagttcttctgtgtattcttgtcaccttttcttaatatcttctacctctgttaggcccatactgtttctatcctttattgtgcccatctttgcatgaaatgttcccttgttatctataattttcttgaagagatagagctctagtctttcccattctattgttttcctctgtttctttgcattgatcactgaggaaggctttcttacctctctttgctattctttggaactctgcattcagataggtgtatctttcctcttctcctttgcctttagcttttcttcttttctcatttatttgtaaggccccctcatacaaccattttgcctttttctattttttttccttggggatggtcttgatcactgcctcctgtacaatgtcatgaacctccatctatagttcttcaggcactctatgggatctcaacccttgaatctatttgtcacttctactgtataatcctaaggaatttgatttatgtcattcctgaatggtttagtggttttccctagttccttcaatttaagtctgaatttggcaataaggagttcatgatctgagccacagttagctcccggtcttgtttttgctgactgtatggagcttctccatctttgactgcaaagaatataatcagtctgatttcggtattgaccatctggtgatgtccatgtgtaaagttgtctcttgtgttgttggaggagagtgtttgctatgaccagtgcgttctcttggcaaaactggattagcctttgtcctgcttaattttgtactccaaggccaaacttgcctgttactctagatatctcttgactttctacttttgcattccaatcccctatgatgaaagggacatcttttttttgatgtttgttctagaaggttttgtaggtcattgtagaatagttcaacttcaggttcttcggcattagtggttggggcatagacttggattactgtgatattgaatgcacagaggcacggtttactgtcttgtatttttcaggccagtgagtccctgcctttggtgccttctctttcctgcctttctgccccagacttctgtgctcagctctgcccctgttcacagatcccagggagtaactgttgctctcaaggccccatccacccaacacctctcgcccttgtgtccaagccctcctcacccctctgtgccgacctccatggatacatcagctggactccgaggggccacagagcctcttagagtctgccacactgaaaagaaagtggttgcgtcctgtttgaaactgcttctgattcccaggcgactcagtggtgatcgtcctgccggtgtaagagctgcagaagatgcagatgtggtccctgggctgggaagatcccctggaggaggaaatggcagcccactccagtattgttgcctggagaatcccatggacagagcctggcgggctacagtccatgggttcacagacagtgaccacagacacagctgagcgagtgagcacgcgtgcactgattgtagtgcctgcagctgcccagagcttcaggctgatctgtttcactcctcaccctctcttgctctcagtggtgacaatttgttaagcatacttcagggagtggacggtttttacatttagaatttgagatagccacaggtgaaaaatcagacaaaataagtcctatgtatctcaagggcttatgaaagtgttgctcagctgtttctgactgtgcaaccccatggactgtagcccaccaggctcctctgtccatgggattctccaggcaaaaatactggagtgggttgccatttcctcctccaggggatcgtcctgacccagggatcgaacccaggcatcctccaggtagattctttaccgtctgagccaccagggaggccccaaggcttatgacgaagtgtttaatagttggcggccctgctggccctcctgcttctcagctgctccacatcttttctctggggaccacccccgatcctgccctcctcagaagccaaaatcctagtatacctcaaaggcgtgttcacttctctctttctgcccctcatcagccttcttgccctccctgctcagcctgactcagcgtggctgtggaatttggtcccatcatcttttattacgcttaaaaaaatcataaacatttcttcatgcttccatggtcatcataactcattttagtgactatataggctattgaattaatatgtcattaacccgtttgattatatggcattttcctttaagttttactcctttgaataaggctcatatgaacgtttaaaaatacatagttcttttcttttcatctgttaaaaaatttctgcagaatcagttgccaagcctggaattcctaaatcagtttattgtttttatcatcatcatcattactgttgttattattaggtaggtaatatgtttctcactaaatggaacaggattcttaccacagaagtagttctaatgtacagtgctgacaaaaaatcatgagaaccctggaaatggtacgttattgttgttctcagttattccttgcttagccctgctcagcagtttcagtctgaattatttaaaataaagaaatataatccagctttggcattttcattttccgagaaattaaatgaatgaagatccactgggatgaacagcaagacaaataagatgatgatttgatgtggatacagtggggctatagtcttacaaagagacctctctttgttttctctccatgaaaaactctgcagccctatgtgagttcgtgcttctcggactaggagggcaaaggagactgatggtagagcccttcacaggatcagcaggagtgtaaggaagtttaaaaagcacttacgtagtctctggaaaaaatgacacatttcctttctaagtaccttttggaaaagtttcaggctattgtttttaaaataacctaaacatagagcttggcaaaatgaacacgtttctaaaaatttttcttttctacattgacacagtcttagactatcagagaaaatccctctactagaaaaatgggtagaagcagcagcaagcaaaacatacaatgaatttaggtgcgtgggtgtaagttgtcaaaacagtgaaggaaaaggaagctgttttatcttagtacagagcatggcttccctagtggctcagaggataaagaatatgcccacaatgcgggaggcccaggtttgatccctggagaaggaaatggcagcccattccagtattcttgcctggaaaatcccatagacagtggagcctggcgggctacagcctgtggggttgcaaagagttggacacgactgatcgagtaacacagagagcatggcttagacattcatgaaggtagtttttgtaaaaataaagccacctggtcttgatactttgatacggtttattaatatcattcaggaatttttaatagtttgtgcctataaaatgttgctaaactgtgttgtgaatagtagattttgtttccaatttgctgctaagtcactttagtcgtgtccaactctgtgcgaccccagagacggcagcccaccaggctcctccgtccctgggattctccaggcaagaacactggagtgggttgccattttcttctccaacgcaggaaagtgaaagtgaagccgctcagtcgtgtccgactcttagtggacaattgtttccagtttgcttaatagtaaattttttttagtctgtggaatttgttgatttttaaaaataaaacagcccaacttaagcctattttaataaccattttttaaaccaatgagacatatcctaaatacaaaacaaatttctgtattacttaatagaagttatacaactttgtttaatacatagtttcttgagagtgctggaggagttgaacttaatattgttttgattttatctcagaagtgggagattttaatttgttgcccaaggaagtaaaggagtatgcctggaaaaagagaaagaaggaattctagatagaacgtgtgaatacagaagtagagccagctatcaaggtcagctgcctgatttgaaacctgattcgcaagcaaggatggtcttctcacagcctgaatgtgataaacaattttttcaggtgaaacacccccaacaaatagtataagtcttgccagttttctagcgtgtccgcttgagctgggtgcagagcacattgtagtactgatgtttgtcctccaaaggaaatactgctgtgtttcaaacttcctgggctctaggtaggtcccattttgacctcgggccagtttgtcattctgaagcttcatgaagttaaagcttgattttttcaggttagatgattgaatggaagaggtaggtgactttaaggttttctgctcacagcagcttctctgctgtctgaaatcatttttctttcaagaagacacagggaagagcacgtcccctgaggcctccactgaactactgacgcatttgtgactacaacttttggggttgattttgggggttttagaatatgtccgcattctgatccttagacccttaaaaccacacagatagggagcttgttaatcgctttgagtgaaggaaggtgctgcccggacaccctcatcttcaagtgccttggcctttactgtcctgtttgcaagtggagtagaattcttgaacaggccttaatataatttttagaaatatttatttatttggccgcactggatcttagttgtggcacgcaggatctttagttgaggcctgtgaactcttagctgaggcgtgtgaattcttcagttatggcacatgggatctagttccccaaccagagatcgaaccccaggccccttgcattgggagcttggagtcatagccaccagaccagcagagaagtccctccttgagcagatttaatgcttagaggagagctggcctttaacttcttataattccttctgtttcatcccctgtgttgaacatacataatggaatgtatccataagcattctgtactaagtaacaaaatactgtcaacaaaatgtgatattgtgttagtagttcgtgttagtatttcaggcctaaggatcatcattataagtttctattgatgattttaggtgagggagagtgaaagtcgctcagttgtgtctgactctttgcgaccacgtgcactatatagtccatggaattctccaggcaagaatactggagtgggtagcctttcccttctccaggggatcttcgcaacccagatatccaacccaagtatcccgcattgcgggcagattccttaccagctgagccgccagggaagcccttaggtgtggaaggccatgccagtgctactcatcctgcggtgtgctgcccagggggacgactgcctggagagaaaagtccttggtagggaggtgcgggatgagggctttggatgcaacctgagctcggtattttgggcacctgaggatgacagcttgctaggatgcggggtctgggtgcgggaatcacaagcatgtcagttgaaccccggatttgaaaccaccactggtggtctctgagcccacgggcaatgggttgcgtggctccttgggagttgttgctagtagttgacatacctgaggtgttctggagggtggagccctccaggtaacgtgggaggaggctgcactgaggtatgagtggtgggggttggatgttggtggatgtgccaagaacagaggcaaggtccagtgtcctaggctggaattacttcttcttaaaaacaagcagaaacctgcaacactatcacatctaaagaatagtgtcttttaatatcagatatctagtcagtgttcctgtttgcagctgtttcatgataacactggagaaggcaatggcaccccactccaggactcttgcctggaaaatcccatggaccgaggagcctgctgggctgcagtccatggggtcgtgaagagtcggacacgactgagcgacttcactttcacttttcactttcaggccttggagaaggaaatggtaacccactccagtgttcttgcctggagaatcccagggacaagggagcctggtgggctgccgtctatggggtcgcacagagtcagacacgactgaagcgacttagtagcagcagaagcatgataatataggcatgtatatgtaacagtttgaccgaatgaggatctaataagtctccacatggtgactacttgatgtgtctgttaaacctctgcagtggtaggctggtcctccatctctgtgtttcccccctttcaaattatgtgttgaagaaactaggtcatttgtctgcgagtttcctgcagtcttgcttttttgctgagtaaaccccagtggcggtggttattgtgttcctctgcatttcctatagactgatagttggatctagaggtttgaccagatgtattgtaaaataaagttggtatcatactgcatttatcaattttatatagggcctgttactttatattatatcatgaacattttcccatgccataagtattttttctatttcataacttcatttaaatggtttccaactagaaagatctatcccatcagttcagttcagttgctcagtcctgtccgactctttgcaacctcacagactgcagcacgccaggcttccctgtccatcaccaactcccggagtttgctcaaactcatgtccatcgagtcagtgatgccgtccaaccttcacatcctctgtcatccccttctcttcctgtcctgttccttctgttcatggaaatgtcttaacttgtgagatttgtggaagaagaaaactaaataaccgtgaacagtaaccaggaacccacaaatagtaacagagcggtttaaacattacctcaaagagtgtcaaattttgatttaagatgttgaactacaaacagtaaaaagtacaggtctgtttacacatgctttagtctgatctgtgtctcactttcccttttaattttggatgtgaacttgaacttcctagaacttctgtcatggtataggtgctcatggaggagtctgcctgattctcgctttgtgaaccgtgtgatgtaggagctcgtttgatggcgcttgaccaaagagactgcgtgtcaccgagtcttcatggttcccgtgcagacgtggtatattaggatctgcttgattgcaaacaacgaaagtcacttgggttcgctgaagctgctgagggtgattgtggtgaggatgctggggcgtctgcctcacagaaccctcagaacccgggaggggcctcgagcagctggcatgaggcccctccacctgaactgtctccagcttctcttcagaggtcagctttattaacgtatagaattctccagtcccaactgcaaaacgtgtggccagaaacagtcattgcaactcctggagaggtgcgagtctgtttctctctcctggtttctgatttcccagggaaggaactgactaatctcttctctggtctgaccagtggtgatcagaggtgggataatgtagaggaaaatcccggattcaacttggcaaagattctgttgtgaccagtctgccgtggctggaagatgggacgtgttgtacaaatggcagtacatacactagggcctgtctccaggtcacataaaatagcatgatgcccgctgtgctgttcagtcatcttatttatttggataaatgagggtcaacatctagtctgtctttattacggtctaatcatttacaataatcttaaataagctgggcagattctgacacatgcatacacccacgtcaccacctctccacagcctgacacggccccagaaagttccctcgtatccctttgctgtgttctgtcctttctcagcaccggaagcagccactgttccaattttatcctcagagactagtcttccttgtctcgaacttcaaacagaatggaaacagagagtgtcagcacttagccttaaatgtatgctagctcaaggttgtaaacagtaattcagtgctggccgtgagccagaatctcgatgctgctggaaataccagagtggctgtgacagagctgacagtgagggacaagagagagcagggactccaggcgaaggcagagcatggctgtgctgggcgaggcggccggtgtcctgctctgagagggagaggcccggagcttccaggaggctgggtggagtgcagaagaggcattccttactgttcttctgagggcatgagccagaatagtaaacctgggctcttttggtcctgtgtcctctgcccgcctctgggcaggacctcctcatctcccgcgtgtgctctggtgaaaggagaggcccagtgactggtgtggaagggtttcctcccaaggccgaggtggctgggaactctcggtgagtgagcagtggtaacgggctccactctgtatgcaggtctctcccagttctccagaaacgttttctttccgtttacctcagctaccctcctcatttgggtgggatggccaagacaccaagtttgcggttggttgccaagagtcagtagtcctcagcgttgtttgtatatcgctgtatagtgagcactttccatgttattgatattatttagaatcctgactcctggttcttgcataacttaccctgtatagacataactgtaggtagctgttgggttggccaagaagtttatttgtttgtaagtaaaaataaaagacatgtttttcattttcaccaagaactttattgaacagtgtagtcagttaaccaaatgaactttttggccatgctgcaaggaagtctgggtttgctctagtccatggagtcacaaagagtcagacatgactgagcgactgaatagcagcaataattatatagagcgtgtgtgtgtgtgtgtgtgtgtgtgtgtgtgtgtagacatgtacatgctagtatagtacaccatgtactctgtatgtgtgtgtgtgtgtagacatgtacatgctagtatagtacaccatgtactctgtatgtgtgtgtgtgtgtagacatgtacatgctagtataatacaccatgtactctgtgtgtgtgtgtgtgtgtgtgtgtgtgtgtagttgtctaatttgtccaattgatacatgttataaagtcagtgggaaatagtattgaaaataagtttacttgggtggcaaagaggataaatttactaaagactactcattcttttcttttctctacaggaccatccgagtatggctgaaaagagacagcggtcagtactggcccagcatttatcacacaatggcctgtgagtagtcgcactgttccacccaagaaaaatgtctttgatgacttaaatttcaaaatgagcttgttggttacctaatacctacagcattgtgtgttaaaatgcaggaaaactccccttctcttgcaaaaaggaagctgagtcaactggtttaactgaatcaacttgaacaaaacttggaaaaaaaataggaagaggaaagctgcccacctcccccattttcctttgtcttcattttgccaacttacattagtagtaattttctacttagtaatagctgatactgacactaaaacaggattctgaacactcctttgcctcatacctggccttttatgctactttttcttaaactctgggtactgttgagaaatttggtccaaggcacgacacatcctaaatggagatgttttttttcccagtagtcaaacatgttctaaaaataaacccaaaatataaagcttttgtattgagattttagaagagccctgagatgtagtgacataaaattgcaattaaatcctgcccttcctaccaatctaagctttgcctccttctctcccacttctccatcctttcttgaaaaaaagatgtggcaccacccaggtccaagctgatgccacatggaaggcatcatagctacttatttctgggtggtttcggtccttaatgaggagattttcctcagttaaggtttcaatgttcagaagccctcccctgggaaaagatgcacggttctggggcaggctgggtgatctgttactgaagaccattacgaagttctccaaagaagagcgcttgccagggccgaactctgtggacactgcagctccgtgaagagttactgcaggggctgtggggtgtgttacaaacacagttattcagcagactctattccgtcagcttgagtcacccttccaagcaccgcctgtcgtgatagcactttctcatttattgcagggtagctgcaggatttcgatcctataaacatttccacaaaggattagtagtttatcaggattttcctttgtcctaccttccactaacagcttgagcaggccggtcaccttctctgtcttgataaccattcaatgagaaccgaagtagactttttggaatactggtgtaaagctaactgttataaaaggacccttttatataattataaaatagttataaaaaactattataaaaagtaaaaaagaaaactgttataaaaagtaaaacttcattgtatgtatgtagcgtgttacgactacctgaaaccctaatcgtggtctattgtgcaggcagtagtatcttctgtcctgcatccgcatttatttgtggatgggtcaccttggttactcagtgtggaacatgaagtggccattgtctcagtaaatgtccttacaggcccatttaataaatttactttgggattttgggaaaatggggcaaaggtagatggagcaccctcatcttctgagcctacctttgactcaactggaaaaaaaaaaagtcttctcttagatgagtaactccttacttccaatggtgcagtgatgggtccatagctgggaatagccacagcaacctggggacctctaccagtgctgggagatggtttgccatccttgtggatggtcttattaatgctgttggctatgattccttcctcctcccccttcccttacacttcagattttgcccacagctcagtcttccttgagacctcagctgtggagttcatgctcttcagaacaaagagagtctaagatggatttttgtacttatgtccagtatttagtacagtgaccccttggcttgcatttcccccaaatacttagttcgctttgtaactgatttctctcctgggacaccagaacctagcagcagcagcacactctcttccttggcttttgagtcttgagcacatggctttgctttctccattgccatcccttgctatcttggcttaactgtatcctccagaagtagctcccagaactctgtggctggaaggatcaggagaaaacaggacagagcaggcacggcatctgtgctgtgggcgactgacacctgcgtgtttgtatacatgcatgcagccttttgcttccagatggctggttattacctccagctagagcagtgtctgctgatgaaactgcaggaacactgccagaagaaagcagaatgaatgaatgttgagaaatttgcttgtctgttttagggtgacttttaaaattaaattcaaaacacaagaagaaaagtgcttttaaaaactactgcagattcaccagttgacattttagtggtcatccatggatttaaactgttccccatgatgaaacagaggtgatcagtaagcgaaaccttagaatattgctgtacatggaccaattatgaatcataacaatacctcatgtaacaaaaataactttcagaatctgctttagctgaagaaaaatgtaactgtcagtttctgtttctacgatgagctgctgctcagatgctcagtcatgtccaagtctttgcaaccccatggaccatggactgtatgtagcctgcccagttcctctgtccgtgggattctccaggcaagaatactggagtgggttgctgtttcctcctccagtaggtcttcccgacccagagatcaagcctgtgtctcttatgtttcctactttggcaggtgggttctttaccactagcaccacttggaaagcccatctactatgtgtctctgcatttttcttggtactattttaccaaatcacaatagctgttataagaaagattatattttcatcatttaatagacaaggaaacaggccagaggttggaattctagtccatgtgcatccaactccagaactgggctgctcaccacagtatggggtgagtccacaggcttctcctacgaaggaccagacataaatattagactttgtgggccagacagtctctgtggcttctcaactctgccattgcagaatcaaaagcagtcataaagaatacatagatgaatgagtctggctgtattccagaaaaccctttgtttataaaactagagtttaaagcaaatgattttgtactacagtgacctttttaaaaggtctctgatttgaaagatgatttgtgttttccttgtttataaaactatgttaacattcacattaaaaaaaaagattatacttaaaaaaaaaacagtttatctcactagaagcttcccttctaggaaaaaagtcagagaatttttatatactaaacaaataaaccaggaagccttgcctttttttttttttaaatgtgagatgtctctaacctcataaaattactcagcacattgtaacttttacacaaaggagaggttttacatattcatgggcagttttttataggattgagcataaaaagaattgaaaagaagcttaaaactagaacattaagatttagtaacaactgaaaagcaagcaaaaatgatgacagtgaatctttaaagtcgtcaaagggatttgatttgttgaagataattttgtgtgtgattattaaagagcattttgtgtgacaatagcatctgtctttgggcttccccagtggctcagtggtaaaaaacctgcctgccaatgcgggagatgcgggtttgatccctgggtcgggagaaggaaatggcaactcattccagtattcttgcctgggaaatcccgtgaacaaaggagcctggtgggctacaatccagggggcttgcaagaattggacacgacttagtgactaaaacaaacaaacatgtatctttgtggttataatccttaaacatgatcattctttgtagtttcaaacatcaatatggtggataagggtgtacaaacttgtagtctattctaattgttaggtgtgtagacaattttagtatttacatttcaatgagatagttcttggaatgactgaaatagtctttttctatagtttgatcatggcttctgtttctgcctttgagtacaatccagcatttcttccagttttcttcctttggtggagaatatctgccatggtagttcagttcagttcagtggctcagtcgtgtctgactctttgcaaccccatcaatcgcagcacgccaggcctccctgtccatcaccaactcccagagttcactcagactcacgtccatcgagtcagtgatgtcatccagccatctcatcctctgtcgtccccttctcctcttgcccccaatccctcccagcatcaaagtcttttccaatgaatcaactcttcgcatgaggtggccaaagtactggagtttcagctttagcatcattccttccaaagaaatcccagggttgatctccttcagaatggactggctggatctccttgcagtccaagggactctcaagagtcttctccaacaccacagttcaaaagcatcaattctttggcgctcagccttcttcacagtccactctcacatccatacatgactactggaaaaaccatagccttgactagacggaccttagtcggcaaagtaatatctctgcttttgaatgtgctgtctaggttgctcataacttttcttccaaggagtaagtgtcttttaatttcacggctgcagtcaccatctgcagtgattttggagccccccaaaataaagtctgacactgtttccactgtttccccatctatttcccatgaagtgatgggaccggatgccatgatcttcgttttctgaatgttgagatttaagtcaactttttcactctccactttcactttcatcaagaggctttttagttcttcttcactttctgccataagggtggtgtcatctgcatatctgaggttattgatatttcttccggcaatcttgattccagcttgtgtttcttccagtccagcgtttcttgtgatatactctgtatagaagttaaataagcagggtgacaatatatagccttgacgtacttcttttcttatttggaaccagtctggtgttccatgtccagttctaactgttgcttcctgacctgcatacagatttctcaagaggtgggtcaggtggtctggtgttcccatgtctctcagaattttccacagtttgttgtgatccagacagtcaaaggctttggcatagtcaataaagcagaaatagatgtttttctggaactctcttgctttttccatgatccagcggatgttggcaatttgatctgtggttcctctgccttttctaaaaccagcttgaacatcaggaagttcacggttcacgtattgctgaaggctggcttggagaattttgagcattactttactagcatgtgcgatgaatgcaattgtacggtagtttgagcattctttggcattgcctttgtttggtagttagagaactttaaactgttttcaagtggtaacttcatttataggatttttctcttttacttttttataagacgttttatttcaaagtaagctcaagtttgtttgtttgtttcctggcattcatttctttctgtggtcaattaaaattcttaaggctgaagtgaacccaaatatttctttttccaagtgttccattttctaaatcacttttaattttgatttttagcagaaggaggtgatttattagagtttctcctttctgaaactcattctctggcccacacttctggaagtttaggtggaacctggaaggtcgtgtctatgggaagagtcaggctgtctcagtcacatgacattgctttggacaaagaaacaaactgggattgtatgagtcactgcaaaacagaactttttttgatcattggggaaaaacaacagcaacaaataatcccaaagcagcctccccagtttgctcacatgccttggaacgggcattgtggtactggacacctctctttccgcagatgcccgctactgttttgcctgtgatggggaagggaggaggggcaggatgacccacagagtttgggtggcagacagcttctctaaacactggtccccacacctttccagaaacaggtaggattttcaatcagatgaaacttcatgctcccttcacccaaagtcatagaagtaacttggaaggttattaaagttaaaattcgaaactaaaacagcagaaagaaatttaataacattttttaaagtaaaacatctttgccctcttttttttttttaacctaagttgtacagctctttttaataacgtaccttgaacaatgacttaatgtgcttaactctgctcataacatggtctttgtttttctggcagctccctgctctgctatggcttaccatcatgagagtagacggatatttgtgggccaggataatggagctgtgatggtaggtagcttccagagtgtattcattgtattgacctccccatgttcaccgttggacagtttaaataaagttaacaaagaatgcccagttgtttggcattaggaaatgtttcattcagtacagatggtagacccaaaactggattaattctagaattaactagcattaattaataaattaataaactccagattttccttgacttatgatgaggctttgtcctgataaacccattgtaagttgaaaaatattgtaagtttaaaatatacttaatctactgaattaattacttaatctactgaattaattaatctacacctaatctactgaatatcataacttagcctcacccaccttaaacatgctcagaacactaccgttggatgaagtcgtctaacacaatgcctattttatactaaagtattgaatatctcatgtaatttattgaatactgtactgaaagtgaaaaacagaatgattgtatgagtccagaatggttgtaagtgtgtcgattgttcactgtcaggacgctaagtaggggctgtggctgcccttgtccagcatcatgagagaggatcatacggcttatcacccgtctggggaaagatcaacattcagaagtcaaagtacagtttctactgaatgtgtattgcttttacaccagtgtaaaactgaaaaatcataagttgagccatcctaagtcagggaccatcctaagtcagggaccatcctaagtcagggaccatcctaagtcagggaccagctgtatctccacggagctctggtgattgatgactcattctcaggctaacccacaatgcacagcctttgtacaggaaatgtgtgtgtgtgtatgtgtgtgtgtgtgtgtgtgtgtgtgtgtgtgtgtcagaggagggagaagaacaagatcagggactagtcattcagccaacaactcgtgtaactctttgaggcagtgcttctgaaacgatctttggtgaaggaccagatatttaaattttcagtttattagagattggtgtttttgtaagtctaattgtatgtgtgtgtatgtatatatttcattaagatgtaattcatataccataaaattcaccaaagtgtgcagttcagtggttttatagtatagttacaagattgaaagtggaagtgtagtcacccagtcatgtctgactttgcgaccccgtggactgtagcctgccgggctcctctgttcacgggataacccagacaagaatactggagtggactgccattcccttctccaggggatcttcccgacccagggactgaacttgggtctccctcattacagtcacattctttactgtcagagccaaggtgtgtatgcatatattacattgagatatacttcatataccataaaattcaccagtttagcgtgtgcagttcagtggttttatagtatagtttcaagattatacaaccgttaatagtctagattatttttatcagtgcctcccaccccccaaaataaatcccatatcctttaggagtcactctgcattttcccttccttcagttcctagcagtcagtaatgtagtttctgagttcattctaaacattttatgtaaatagaatcataaaatgtataactttatatttggcttctttcactcagcagcatattttcaaggttcatctatgttgtagcttgaattaatacttcagtcctttttgtggtggaataatattctgttgtatgccacactttgtttatccatttattagttgatagatggattatttctaccttttggctactatgaataatgttgtgaacagtcacataaaagtttgtgtgtgaacctgagttttccattttattgggtatacacatctaggaatggaattgtgggtcatatggtaactctgtatttaattttttacagaactgccaaactgttttccgaagttactataccattttatattcccaccagcaatctatgaaggttctaactttttacatatttaccaacacttattattttctgattttgttgatttcctagtcagtgtgaaatggtatctagcttatctagtttgttggcatatcattgttgatagcagccttttttagtcctttttgtttctgtaagattaatagtccccttttcattcctgagtttagtagtttgagtcatttctctcttttttttccaccagtctagctacatgtttgtcaagttttgttagttttttcaaagaaccagttttcactgattctctgttgatttgttttctctattatttttctagtctctgataatgtgtatcagctcttattttttcttcggtttgctttgagtttagtttccttgattgctattttggatatcacattactgagtgagaaaatttagaaggatccctggtggctcagatggtaatctgcctgcaatacaggagacccaggtttgatccctgggtcgggaagatcccctgaagaagggaatggcaacccaccccagtattttggcctggagaattctgtggacagaggctgcagtccatggggtcgcaaagagtctagcaggactggatgactttcacttttaagtttatccgcttgaatgtcatggcgatattaaattgctggaaagtttttgaacacttattccctaattttctggtactttaatcaggaccagtggtccacagacctcattttgagtaacactgctttacagaactgggaatggtaacagcaaagtaagatttagctcatggggctccatcacgtgtgaagtgaagggtgcacacagagcggtgagagcgcaggttggcgcctgcacccacccggcccgagagcctgtagctgctaagccctagcgggtggcggggacttaaccaggagaggaggaggaggacttgcagacacacagggctgtgccagcaaagacagaggttttcgaggtccgagtgtgtgcagagaaccaaaatgaagcagcttggcagcgtgaaccacgtacgactgaagaggtggctggagcaggtcagagagccgtgcgttcaggttttactcagcactgggtgtcctgcagaatgctaactaagaaggaagtagacatggtccctgctcccaggggtcttttggactagtaagaaggacaggtaatacaaaagtaagtgtcgcattacaggttgcgttgagcgctgtggggaaaagaatgggagtgggaaggagagggtccagagaggggtgtggccctgcacccagcagacaggatctgcaggaaagagggcttttccagggctgtgacgtccagctgaggcctgaagggcaggcaggagacagccaggcagagcaggttttccaggagcgaaggtatgtgtggaggcgcaaggcaagaggtctctgtgtgtctgaggacttggaggacatcctcttggctggttggtgctgagtgacagggcagcactagggctgatgggacccggtgggctgagggcaggtcattcaaggccttatgggtccgggtgaggttttcaattttgtaaacccttgggaagctcttccagggttttcagcagaagaatggtgtcatttaatttacaaagatccccctggctgctcagtggagcacggactggagggcaacaagagtggaggtgggagggaattccctggtggtccagtggttagtattcggccttttcattgctgagggcccaggttcttccttctctggtcagggagttaagatccggcaaagctatgcagtgcagctgaaaaaaacacacacacgctctaacaccatatataaaaataaactcaaaatggaccaaagacctaaatacaagtataaggccagacactataaaactcttagaggaaaacataggcagaacattctttgacacaaattgcatttaatatcttctgtgatccacctcctaaagaaaataaaaacaaaaacaaacacatgggacctaattaaacttaaaagattctcaaggcaaaggaaatcatagaacaaaaagacagcccacagaatgggagaaaatatttgtaaatgaagcgactgacaagggattaatctccaaaatatacaaacacctcatgcaactctatgttaaaaaaaccccaaaaacccaatcagaaaatggccagaagatctaaatagatattactgcaaagaagacatacagatggccaagaggcacatgaaaagatgatcaacatcaagagaaatacgtatcaaaactacaatgagatatcacctcacaatggccatcatcaaaaacatctataaacaataaatgctgaaaagggtgtgaagaaaaggaaacccttctacagtgataatgggaatataaatttgtacaaccattaatggaaaacagtatggcagttccttaaaaaaactaaaaatagaactaccatgtgatctagcaatcccactccaggcatatatccagagaaaactaatccgaaaagatagatacaccccaatgttcattgcagcactgtttacaatagaagcaacctaactgtccattgaaagatgaatgggtaaagaagatggaacattactcagccacaaaaagaatgaaataatgccatttgcagcaacatggatggacctagagattatcatacaaagtaaagtaaacagatggagaaagacagatatatgatgtcgcttacctgtgcatggtaaaacatggtacagatgaatctatttacaagatagaaatagagtcacagatgtggaaaacagtgttgttagcagagggggaagtagaggggagaaataaattgagacactgggattgataatatacacacttttatatataaaataggtaaataataatagatagtatagcacagggaactctactcgatactctgtaatgccctataatggaaaggaatctaaaaagagtggattgtgtatgtgtgcctgttcgggtccattgtacagcgcggactcacacacattgtaaatcaattatacagccacaaaaattttaaaaatggaggcggaaatatcaattgttgtcaccgtctgggtgagaaggttgtggcagtgatgatggacagaagcagatgtcttgagctgcagctgtgacaggttgggtgcagggtggggagaggagcaagtcaggtgagggctgggattttggcttgagtgtctggtggatggtgctatcatttattgagaagagatggcttaggggtgtgtgggaagagggcattcagaacaaaaggacagtgaggaatcagtagtaacagttaagatactgggaagacaccattcatgggtgatgcaaaatgggccaaggggtgggaggaccagccaggacagtggttgtggtagctggagaagcagtaagtttcagttggggcagagagaggatgagatcaagacaggaacatgaccttggggatggctgttagcagctggtggtcgcagggagagccgtttccatgcagtggggtggtgccctggggtgcagtggattgaagggtgactggggtgaggagctagaaagcctgaatgtcgagtgtgggctgatctatagagaaggttttggctgggatggggtggcggggggtaaagaaagttttagcattgttaagagagttttgtgttcatttgttttgctttttaaattagaagaagtcttgagtgtatttaccagccaggaaggaaggagctaggctctctgcatacgaagttcactggacaatagacaggtggtgggaacagagggcgggctgcaggatctgcatggtttgggttgatgcccaccagtttttggctgctgtaaatccattgtgtgataataaatgctagtggtctcgtttttctccttctgaagatttttatcggaatatggtgatgtgcacacacataataagaggccagtagcaggcctcagatagcatctccaggaatggcagtggccatggatttacttctctatgggcccttcttgtggctcctggttcaagggtactctaccgccattatagtgaagtcactgatgtgaaactcttaagtggaaaggggcgatgtaagtccagtttagcattaattagtattgaactgttgatttcccatcagagactgtggtggtggtttagccactgagttgtgtctgactcttgtgaccccatggactgtagcctgccagtctcctctgtccatgggattctccaggcaagaatactggagtgggttgtcatttctttctccaggggatcttcccaacccaggagttgaacctggatctcctacattgtgggtggattctttactgactgagctatgagtcccaacagagattagtatatataaaatgccgattcatttttgtactttgtagaaccaagatgaaggataagaaatcaatattcctttgtggagtgtttttcatcctgaccaatcaacaatttataatgtccatgttatctagacagttaagagcttaccaatttagcactgatcaatttcctaagtagtgcattttctttagagttttatcttagtcttatgcctgaggctcatttttttcattaagaagcacatacttttaattttttcctagttataaagtattacacagtccataaaaactttggaatataaaaaaggaaaaccatcacaatctttaaatttctttttttcttgtgtgtttgtgtgttaaatatatgtaatatgccccatctattgcttcagatacccaatgccttattttcactggtgctgagaactgttagtaatgggtctttgtatatcactttactttggttatatcatcttgagaaacttttagtgacaccgaaagagcaaaattaacaggatgcctcctttgcaattagaggggaaggaagtgtagagcacttgtttgtagagtaagagttagaccaaaattctgtggtggtcagcagcactttctttacttgtctggttccaaaataaatagtgttgcaaggacaggaccaagaagcaattctctactgttcttatggagccaatcttgagtcataaggctggtgatggccagttttagattttacatccttttggaagataagttcccattgtttttaaaactataactgttctcttattgcatttttttacttttaggaattccacgtttctgaagattttaataaaatgaactttataaagacctacccaggtaattacaatacactcatttgcacacatacacacgtagatacacacaaaaataaactaaaacaccatgtcctatgatcaaaattaggttttcacattaactttttaaaaggttggttaccccagttacatgagaggctgttatctcttcagagttatttacacatccttttcctgcttattaacacttgaaattttgtatactgttccactgggtgcacatgtcagatttagtttaaccattgctctatttttgaaaatgtgtactcctcccatcttttgataacacatactaagatatatgaagatatgtacataggtatgtgtgtttacatatgtctgggtgtattttatacatatgtgtgtgtaaaagtaatttcctatatatgtgtatgtgtgtccttgatggttactgactcagatcctgtaactcttattactttaagatagattactaaaagtagaataactgggtcaaacattaaaacttttttttaatactctagatttattttgcaaaactctttccagcaataggataaatattttaatgagtggtgatcgaaagtgcctgttcattaagtcttcattgctctttttaaatgcttattgccagtttgatagtcaaaatagttctgttttaaaattatttaaactttatttgatattggccatttgttatgttttatgaatgtctacatgactacacctgcattcccagggggttgtagtgttctctggttaatttataagaaacagtccctctgtttctctgaagcagcctgtacagctgagagtaaggtcagatgtgtctctgtctagcttctgacttcattcatcagactgggcatttattaaacaccagctgtatgcaagaccctgctccatgtaaagtagacaggtcactgccctggtatggcttaaaattgacctggagatagaaatagtccagaagttaagtaatagaatacttccttattctcagctattactttggaatgtggaactttacaaatgcttcatcttagaaataatgaaaagttaatttcagaaaatttcagttgcccttttcacaatgccagtgttttctaaagagtcaaagcactaaaggtacagacaataaaaacaaacaaacctgttctgttaagaaaagactactgctttccatatgaaactcattgatagttgcttgaggtttttttaaaatctgtcctctgatatattatttgaatccctcttgagcattattcttttaaggatttgtagcttctgatggtctcctcccttgcagggaggcagagggcagggcctcagaggcctgcccattagatcatgggttgggggtcgggcagattctctgccacctgttcagagtgcaggctttccggggtgggcctgtccagtctgtgagtctgcaggctgaccaggtggagaaggggagccccagttcccacccactgagactggatcgcccaggtcgtgtttcttctctgttcccacagctcatcagaaccgggtgacggcaatcatcttcagcctggccaccgagtgggtgatcagcacgggccacgacaagtgtgtcagttggatgtgcacccgcagcgggaacatgctcgggaggcacttcttctcttcctgggcctcgtgtctgcagtatccttcccggtctcaggagttagctctgcatctgatcctcaactgctaattgagatctaaaggctaaatgattcctatgtatttcacataaaattgaagaatttctggctctcctttcttgggtataaagttggtttattaggacttggtggttaagacttggcctcccaatgcagatgatgtgagtttaatccctagttggggaactaaaatcccgcatgcctcttggccaaaaacccaaaacagaaaacagaaaaactatggtaacacattcagtaaggactttaaaagtggtccacgttaaaacaaacaaaacacttttaaaaatggtttattaaaagtaataaatgaattgctggtctctgctggggtgtgctataggtgttttaatacggaagtctcagaaaatctaaaccttgttcatacagacccctcccttcattcctttgttttttgaagtgaaagaaaagactttctgttgtgtaaagagggaaaaaaaaggaatcaatcttctagtagtaggttatttgcagacttggcaagagaatacaagaatttgtgaccctggaattcataaaagggctacaaggagttttttagttttcttgtgtgtgtttgaagagggttcataatctttatatgactctcgaaggtgcctctggatccctcaaatgttaagaaattgctgctctgaaattctgctgctctattggatttgtttcctgtagagtgtgctcttgcatcaggctgcctgtggtagctgtgtatcttagtgctggcaaggtaaaggctgtcagccacaggcaaacgccccatggtattttctcttttcttccgtgttggacatctggtgtagtgaaattctttcttccattgagagcctttataaaaatgtttgctacaaatgaatgtacagcatgagatatttaaaacagtaccatacgctttagacaaacaagggaaagactactcagatatatcatgtgctatataggctttctgttaatgtgtttcatatggattgatagaaaatagcacagaattgcatcactgtggcccagcctgtggtcttccttttgatccatattttggaattaaaacaataattatcttattgtgtttagatacctgatttgccacaaactgctatggccatagagtaaccaagtgttaatgacaagttgttaccaagagttaatatatttttaaattttaaatttactactgccccaaatgactgccttttggatggctaaactcttcacagcaatttaaagtaaaccatcctcttcacttacatctaggcccccccaaaagatgagttcacatcatttgctctcagttttacattatttccagagataatttcataaaaggcatttttcttccagttctttttgactgttttcattattattttacattttaaaactttaatatgattacttatttttatgtctttctctatcagttcttttatcttttttgttgccaattcctaggatatcagttgaaataataacaggtactcagtgaatgcttattgaatgaatgaatattaattttcctgataattctagcttaaagcatttttttctttggtgtttccatgctgtatgattttcagtggagtgtttcttttctcatagttttaggtttgtgcttaccatttatagaatgtacattttctgctttgtaactttgagatggattgtgttatacatccttgactgcttctccacagatatgactttgatactcagtatgcatttgttggtgattactctggacagattaccctgctgaaacttgaacagagcacctgttcagttattaccacccttaaaggacatgaaggtaggctgtgtggtcactgctgtttttcacctaatatgtgtgcatgcgtgcctgctcagtcgcttcagtcgtgtccggctccttgcagccctgtggactgtagccctccaggctcttctgtccatggggattctccaggcaagaatactggagtgggttgccatgccctcctccaggggatcttcttgatgcagggatcgaacctgagtctcttgtctcctgtgttggcaggtggtttctttaccaccagcgtcacctgggaagcccttttcacctaatatgggcatccaaatctagttctgggctctgtggtttcatgaatgattagctccctaagatcgtatcaggtttcagtttgactggccagatatgggacttcagtcccagaagatcttatgaaaactaagtgaaggcaaggtatggggttaggtttcatgatcccttctagatttgtctctggtgtgacatcactttctgttctgtgccccttttttgattagtttcagaaaacctttttaaaattttgtataaatgataagacctttggaagaatattgttattactattttaaatttgtcgctttttaggacaccacgcaagacacagtaggtcagtcagtacaattggaagtgtatgagctggttctgtctttatttgggaaacatccactggggagggactgagggaaaagaaagactgggtggaattctgctatttctgtagcatagtgcgttggcagggcttcgtggaaaggttttaaagctcaattgactgtatttcataacagattagaagctttgagaccatctggttcagattgaagagttaggagtttgttgaaggaattaatggtggattgatttatgaaaatagtgtttttaagtatagcaagtttaaatgtcctctgtaggtaatttatttagataaatctgagtctgtgaccttgtagaggaaaagagggagggaaggacagtaagtttgagtagataaatctaaaggcagggaaacacaggccctcagaaaccactttctgtttatgactcatggtctcatgatcccaggctcttaagtgttctctgggttgctcaggacagaatgagttctgataactactcagcagggttcatgtagaaggagctggcttgtctgctgttaggctctaactgaaaaacatgggtcataggatcaaacagggctagggtttctgcagaattgatccctgaagccagttttgcacagtacttctttttcactttggttaagcttctgtgagaaacagtctcttgtggtttgcttttgaatatggctttaccagttttctatacacccaccagaaatactgttagcttgtgtgactggtttcataagtttattaatttttctaggcaggcagcagttaatggaacaatgaagagatctgttgaaagagaaatctggaagatttttcccaagggtatcaaatttagtaagtttagtcaatatagaatgtgaaacgtaggatttggatttttacctacattcgctggcataatcatgtggtacaatttcacttttttttcccttcctctaagatgcttaatttccttaaacagaggcaacctggagtaggacacccgcaaggtcccagagacctggaataatccagacttttatcttagaaaacccctgaaaccttcactgcctttgctctttagatactggtagctatttttttttcccaccttcaaaagctttttctgaactaaccctcatgtacagctattttatagtttttggtatagaggaagagaatcttcttttaaacacctttgtgttcagagtagtttgatgtgcaactaccgaaaatcctcgtcttgtagcttgggtaggggctgtgctgtgcctcctctgtgactcatgataaagcgtcagacgctgatttatgccacaaagatccacttttacatccagactcagctagtcctggttccgtcttctgttgtcagttgtcatgtgccagtggagagtcccagctaacctccctctctcacccctagggagcatcgcctgcctctggtgggaccctattcaacggctactcttctcaggagcgtccgacaacagcgtcatcatgtgggacatcgggggaaggaagggccgcacgctcctgctccagggccaccagtgcgtgactggaggggtggaatccaagctggggcgaggcggggggaggcatgagtactctgagaccaccgtctccaaattgcatcctttcaggtgtccacgtgatcgggctttctcccacctttctctgccaaggagtcaccccagtgaaatgtctgcttcaggcagacgtgggttagagaccacgggtggggactttgaccttggaagatggcctttggtacgacacttaagccagtcttattagtggatttcattaaggaataatgtctggattgacccagtcctgcttcccctaagctatggcatttaatgctcatgtttttgccatctagtcttgaagacgaaccctttcctccttactgggtaggcttgtctgttgcttggctacgagcagagtcaagttgaaaagcagccaaggagaggaaaacttctccccacgaatctacaagtcaggaggttgtttcctagggcgtccagagaaggaggcagacaagcatgcaggagcagggccgattcccttatcttgtcagagtgtgtgtacgtgcgtgtgcacgcatgtgtgtgcaccagtaatctccatcgtgttcaagtgcttgttcttacagattatgtaagtaagtgagttacacctcccttaagagatcaacacctcttgagttctgaacacctacttgttcagaaacaatcttgtgcacctggaaagaaattatagtggttggtccagaaaactgtggtcaccatctcctctctgacctgcagttcttaatgacagatttgaaagtagtagcgtttatttcatagtaactgtttttctgtataatatattataaaatgcctggtaacgtatatacggggatccagatgaccataccaaatagtgataaaatgccagttgctgattccagcgaggggagacactggagcctgcatgaagacagtgtgtttcccagcttgaggcagtgacttctgtgtgtttgcagtgatagagtgcaggcgctgtgttacctgcagctcacgaggcagctggtctcctgttcctcggatggtggaattgcagtgtggaacatggacgtcagcagagaggaggtaagagagagcaaggcagggctgatgcagggaggcccacagcccgcctctcggttttccaccctttggctggagatgcaggcagtcccagctcctccccgctgtgcttactggttgctgtctaatgtggtcctgtgtgtcactctcactgtgtcctccactcactggagagtttccaccgggacaagcagtacacacagttggcgcatttaggctgattttcacagagaagtgcatggagagggtgctggagacagtccagcctgtccagggaatggacgcaggcaggtgttccaaggtggtgctccacatcttgggatgggatccccaagacactcaccagggacatcgctcatctgggaaaatatttccccattctctgcttttattttccacgagttctgtcccactgagtctgtgtcactatagtgttcttttccggagacctgcgtttaagtgctttaatttccttatctccgttccttcttccatcaagtgaaataattgaatgagatgacttctaagctctcttccagttatttagacagacactataaacaatctctcctttttttctattttaaataatgctgcagtgaacatttttgaccttgtcattgtatgattgttcagttatttatttcagacaaaattctgaaaatagacccttcgggtcaagggtatgaacagtcttaaggctctttatagattttgtcagatgatttccaggcaggatttccattttcatctttaccagcataggtatttgtcttttccaagtgacgtctaccacctatggtgtagagagtggcgttgattccaaagaagatttttttgtgagggggttagggacttatggtttaacctcagaagcatttactgattagctaaacgttagccctaaagtctggaaccttaggcacatatacctcgtaaatgatattgtattgtggtgcatatgggcttcccaggtggttcagtggtaaagaatccacctgccaatgcaggagacacaggtttgatccctgggtcaggaagatcccttggagaaggaagtggcaacccactccagtattcttgcctggaaaatcccatggacaaaggagcctggagggctacagtctatggtgttgcacaattgagcagctaatcaaaaacaactcatactctgatatcacacgatgtgttccaagtgctgtcctttatacagcgtgtaggtcagcttgctgcccactgcagtggatgccaggcgtgactgcagcattccccacaagccctgcacatgctgctttgtgtcacctctgattacttgtgagtctgattctccctgaatacagttgcatctttagcatacccttggggacataatcagaggggttcagtctattaaaaaaaaaaacagtgacattactttatagggcattacacttccagactttataattactgtgctctatacataaagattcttgcctaccagaaacttgcaatctagtgaaggaaatagattcccctataaataatcaaatttcattcgtaatctggagaagtactgattgctagtgttttagtgaccttgtgagacaagtcaaatagaggaaatattgatggcatgtctgctggttaatttctctatttgaatttcctaaaaagctttttggtaagcttagaataacttgttatgaaacacatgtaaaattgactcagtattacagaatgtgtaatactgcctttgcaaaggtttatctgaactgggctatgtatttgtcgcctcctagtttcatgcaacatcagcagctagtgtactgcgctgtttcagtcgctcagttgtgtccgagtctttgcaaccccatgcactgcagtgtgttaggccctgtttcctagacttgttgctcttcagtctaattctgagagagcaggaactcagggggaggatgggtagaggatgtgttccctgagtcaggagggaggagaccattggggcctgatgctactagtggctcttgtaagggtttagttacttggatttcagtccactgttctcatccttgctaagtccttttagaagtggaaagtagaagcagggttcttatttccaaggttatatgaatgtgaggttatttgtgtctctagggaaagaagagagtcccatcttctctttgggggccactcattcaaggtgcttcctgtgtgtgggggggactcttttcctctgaatcacttatagacagttatcccaaatcatgtgcacactggctggtaacactgtctcagtggttggcactgttggtgggaaagaaaattatgtcaaaatgatacagtattttagtagactttttggtttggtggttgttttgtttttaccaactgagtaaatataagtgcaaaagtaagcagcctctggtatatgagattctgaccttgcattagggttttctacaatttgtaggacttccttaggcaccagctgagaggattaaccccagattctctagccccacagtccttgctgggaatttctttctgagtcacctggaaacactgactgggtcatctccaacccacagtggctgttggccaccacacaggcaggttggaagcagacgatccttgcccgattgtaatcaaagggactcctttttggaaggaggcaagagacataaatgagcaagtagccatagtaaatccacatgaagaaattgtatttggagctagctgattacagaatggaaagtattttatacattagtgcaaaacagattatcagtgccctggggttcttgttacatcatctttgtccaggttagggaggtggaacaaggttgggaaaagagagtgcaacggtcagaatacttgaataatgttctcttttgctcttttcagcacaaaagaaaacttctctttagagaatgagcattcagtaggatggttcatgagagcttataccataacacttaatcctattaaaagaaacaaagttacggttatttcttgtattaaaatatgttccaaaaagtctatttatttctgagtttgtttttttgtccattatctgattattttaagcatagtttttctttccttgtgtccctgtcccttccagctcagcaaaatgatattcttccctaacccttagacagaattatgctccctgagggcaggaattcagtgccattggttgtcatattccagaaacatgtttggagaccctgttgaaatgaagaggaccatgtccagaggctgtgtagagtacagtggacaagcgtaaagatgggggctggaatcctacatctcctgggagcttcacccattgaccaaccatggacagtccacctcagtctctgagccacagtttctttgcctgtaaaactgagagaatgttgttctgcatttcctagggttgtgtcgagaatgaagcaaaataaaccccttggcacactggtgaacttatatggcacttgctgtataccaggcactgtgcaaagcactgcaaatatcaacgcatttaatgctcacagccttacccattgtgtactcatacttggatattgctgccatgaagatatttttgcactgttccacatatgggtggtgttgcaggagttacactggtcacaaactaagccgagacagtggccctgctttccttcgtttaaaggacgtttcctgcatttaaacgttcccatggtgttggcagcaggccccactgtgtcacgggttttccttgagggacgttgttcacaggcagggttctcaaaccccctcctctcttccctcatcacagaaatgagcagttctgcatcgggtagtaagcttgtcacgtgggtatgcatttcctcttcactctttctgtcctctcttcccacttccagcattgccccagtcagttacagaaggctcttctgtcttagcctgcttcattctgtttgtgggtcccttctccacccccacttaaggaagaaagacttttgtaatggctgtcttatgtagaaatacttgtaatgccatatctaaaataagaaataggaaagccaaaggttttgatgcaataggaaacaaaaaattaggggcactcactctttaaaccaccttatcgaatctgtaaagctgaccatcttcactgaagattttttaagggtcagtgtagtttgatttctctggttctcccatcattgtctccacttatcagataaatttttcttgagtgttaactttcacagtcaagaaaagattattccttacttcatgatctttggtataattttagagtattttctatttttcttgcatatatattatgccaagtgattgaggtcaaatatgcaaggacaactcttaagagttcataatgcaaattgaagtcctccctcctgtctataggttgaacaatctaaaattaaacaatcttgaaaacattgcaaaaatggcaaagattactcaaaacacaaacatagtattgaatgaatatggaaacagctataatacatagagaagttaaaaaaaaaaaaagaaccccagtgaggtatagaactgttgtattaatttctgaaaacttggtataaataagcagatgctttgatgttgggtctgactttctcttcccctaggctcctcagtggctggaaagtgattcttgtcagaaatgtgagcagccctttttctggaatattaagcagatgtgggacacgaagacactggggctgagacaggtgagtagctggcatccatttgtcactgtgttaatcacatgttttgttatttatatgattagtataacattttatttggaatcgcacttttccctatgaatgctcttaattcctacatttgtgatgtcaccatcattgtgtaacaaataggagcagatctttcctgggcaatagtgagacttaactttcccaaagtatgccatcgctcatcctgcactgggaaagcagggatgtccagaaaacccccaaagcctatttgtaaagggatgaaagagctctgagtttagggctgttattttttaaagttagtatttgtaccagcccagcacaaagtcaaaatgaacttggcctctaagccttaaactttcatgaacagacaaaaagtaacagattagccctcactggaatattctgacagtaagaattttagcttgttccatgtgagtgtacctggagcatttctgttaagcatgtttcaagtatgtactgttttttaattttgtaaattaattgaaaaaacatgttccagatagcctgtagatttcaaggaagctcttacccttaggtattcatgtaatactaaggttctacaaaaagcgtagttctacagcaggcttgaaggtagccactcaactcagactgaatgtaaatttgtgcaggtaagtaaaaatggaatgccaattttaattgcttttcttatgggttttaccctctctaaggaattggtggaaagtttgtgcgtgtcaagaaacttacttatgaagctactctctagcaaggtcagatacaaaactgccagtgtaggaattattttatcacttgtgacattctaatgcttagaaactgcagcagtattctctttagcctcgttctcacaacacatggctggtagtaactggtgggtgaagtagtccgtacttcaaaggaaacatggagaattattatgacttaacagctaatagaagagcatggaaaggtattggtcacaaaattttagtggtttaaaaatatatatatgtcaaaagtagtgataatagctggactattttggaatgttcttgaagctcattttcagagtcataatttgaaagagtaaaagaaagagcaaaacatgattatggatgtttgtttcttaatgagggcaaattacatttaaaactttacttccatttataacttttgttataggattgtttttccttcccaaagtctctagctatttgggttcctaaatgagcttgaacttggttttaatgtcatttgttgtcatctaagccaaaaatatgaatgcataaatatcagtatttcaccaataacaaagcaaggatatttggaaatctttgaaagtgttgaaatagcttgcctttggtgtgttaattgatacactgaattaggggtgattataattcatggagaagggaatggcaaaccactcttagcatcttgcttggagaatcctatggacagaggagcctggcagccaatagtccatggggtcacgaagagtcagacacgactaaagtggcttggcagtatcattcaaggcacatcatccccaatcctgttccctgctccgaagggaaaccatgtgccttaaaacaagaggttaactcccgctctccctccttcctcccggaagcatcactgccggaagtgcgggcaagctgtctgcggcaagtgcagcagcaagcgctccagctaccccgtcatgggcttcgagttccaggtccgagtctgcgattcttgctacgactccatcaaggacgaggagtgagtgttcgcttgtctctgtcttactgtgtgttcatccgcagcgggagagcctgggaaatgacatgggtatgcaatcgacccttgcacaacggttagggtcctgtcctccatgcagtggaaaatctgggtacaacttagagttgggtgtagctgggtataccttagaccctctgggtctgactgggtatagaaatctggatataacttagaccttcctatccacgagtctgcagatcatttagcactgtgatatttactagtaaaaaaaatccggatataagtggaccagtatagtttgaatctgtgttgttcaaggatccactgtattgatcttttgtctcttgtaaacagtttccaaggagaggattctgccctggctttgtgacttaagacaagtctctcccaaacactttgaggaatgattctgctcaggccagccgtgagccagccctgagcctccgagccatcaagagtgctatgagggtcaaggctgtgtgcacactggtgggtggttgagcaggcgctctacagaggcaccccagcttcgacctgtgctcacattcatggatgatttattagtgggaaaaccctggagactcacattctctcccacataaagtctgacctagtgatctgtgcttaaataactgtgtacaagacatatctgtcccctattcagtcctgaatcagatccatgaaggcaggaccagcattttcttttgctccttttttaaaaaatgtattttattgaaatgtcgttgagttgttttggtgtgttaatttcagccatgcatgctaagtcacgaagtcctgtccggctctttgtgacaccgtggatcatagccctccagtctcctctgtccatgggattttctaggcaagaatattggagtggggtgccatttccttctccacttctgctccttttggaattatctttgaaagcagtagctgggcacaccttggtggatgcccaagtaggaaggctggtgtggtaccaccgctgctcttggtcagtgagctggtgatgtggccagggtatgggcttcggagtagagtgagggtcagcaccctggggcagcactgcctctcctgcctggattcgcggggagcctgcagcctgtgatctcgtgcaatgtagttcccctttgttaaaggttcttgttctgatgtctagggatgtacaagcctgtccaccaaaagaaaatcaaatatttggggaattttggaaaatcctttgtaaaactgcttgtgggaattccctggaggtccagtggttagacctctgctctcaccaccgagggtgcacgttcagtccctggtagagtaaccagatccctgaggtcatacagcacaaccaaaaacaaacagaccaaaaaacccccagaaaaccagtcctgcaacttaggctttctgtcatcctttaattatagttggttttcaaaaccatagctacgtttcggggagcaaattttgacactgttaccgtaaatatttcctttatgtcgctaagacaactcatccctcagctctagaaactgccgggtgagtttaaatggcctctcttctctctgttagtcggacatctctagcaaccttccacgaaggaaaacataacatctcccacatgtccatggacgttgctaggggcctgatggtgacctgcgggaccgaccgcgtggtgaaggtaagctgcctaattgtcccagttagcacctctatgcagactgctccactgacatgctgtgagtgtgtaaggcagttctgatggacaagctcaccttccctttggatgaactccccatggccaggtgaaagccctggctaacaaattgcatgtttgtgagtttccatgcccttcccggcggctcagtccagtggggtctccctccactgtctcagtctctccaagtaagctggtgagggcctgccacccctctgtcactatctgccctgagctggccccagggtcttccctcccactgcctggccttggctgacctctttctctggttgctccttccctggctaatggtcctttatcctggatagaatactccccatttataagaaataaccatactttcctttgttaaatccccgagtgactagcacagaaacggagtgtgagcgctttatcctgagtgccgttcttgagttataaaactgccctgcctgcacatgtgctcagctgctcagttgcctctagcagtttgcgaccctgcggactgtagcccgccaggcttctctgtctgtggaatcatcccagcaggaatcctggagtggggtgccgtttcctcctccagggatcctcccaagccaggaattgagcccatgtctcctggggctcctgctttggcaggtcaattcttttaccactgagccacccgagaagccctgtaaaactgtcatcatttgtttcataattttaaaaatgggttttttttcccagtgggctttttattcaaaataaaagtaaatcgtagtgaaacattattatgatgtaattcacaggtgttgagggaaatactgcttataagcttttattgtgttttagccaaccacattgtctggtcactgtgtaaatctccagaaggttttatagggaaagaagaggatgagttgtatgtctcgacctgttggccagtgtaccagctgtctgtcctcctgtgggaccacatggccgatgccacctctccaggtcccccccttcttctcttgcagatttgggacatgacgcctgtggtgggctgcagtctggccaccggcttctctccacactgatgcgggggccagcggggtctgagtcttcgcaggggccaacttcccctacacacgacgcttccctctagctccacagtccttgtcacgtggatgaacagccagccactaaaatcaaatcagcatttttataaagaacaaaacgtgaacgtgtgtttttgggcatttgtggaactatccgtggggaccaacatagcaggtccctgaggagtggagttactgcagggagatgtcctgcgagcggcgagctgacgggtgctgagatggtaatttagcacaggagagtttcagaagaaaaacactgaacgaaagagttaaagcctagaagtttcttcaagcaattccaagtgcaaacacactcccctccccccagatttactgggccctcgggggctcccacgcatctctgcgatcagagcaggggtccagggaggaggacttgcgttctctcttgggggggtacaggggtcttaggaacccagagaccctcctcgtccactggc

SEQ ID NO: 249 - DNA, 20 bp, synthetic construct
  source 1..20: mol_type = other DNA
tcatagctactcccacaggg

SEQ ID NO: 250 - DNA, 20 bp, synthetic construct
  source 1..20: mol_type = other DNA
tggtgattccttgagggatg

SEQ ID NO: 251 - DNA, 20 bp, synthetic construct
  source 1..20: mol_type = other DNA
aactaagtaagcttgccctg

SEQ ID NO: 252 - DNA, 20 bp, synthetic construct
  source 1..20: mol_type = other DNA
ttacccacatcactaagacc

SEQ ID NO: 253 - DNA, 20 bp, synthetic construct
  source 1..20: mol_type = other DNA
taaggcgctggtgaagtcag

SEQ ID NO: 254 - DNA, 20 bp, synthetic construct
  source 1..20: mol_type = other DNA
accaatcctcacctttcacg

SEQ ID NO: 255 - DNA, 20 bp, synthetic construct
  source 1..20: mol_type = other DNA
tcctaaacgtacaatgactg

SEQ ID NO: 256 - DNA, 20 bp, synthetic construct
  source 1..20: mol_type = other DNA
taactcctccatgaactcgc

SEQ ID NO: 257 - DNA, 20 bp, synthetic construct
  source 1..20: mol_type = other DNA
ctggcactcgaggagacgct

SEQ ID NO: 258 - DNA, 20 bp, synthetic construct
  source 1..20: mol_type = other DNA
gctgttgaggggctggtctc

SEQ ID NO: 259 - DNA, 20 bp, synthetic construct
  source 1..20: mol_type = other DNA
agacagtgagcagactgatg

SEQ ID NO: 260 - DNA, 20 bp, synthetic construct
  source 1..20: mol_type = other DNA
cctttccacgctcacagacg

SEQ ID NO: 261 - DNA, 22 bp, synthetic construct
  source 1..22: mol_type = other DNA
tcatgtcccctttgcttcaatc

SEQ ID NO: 262 - DNA, 24 bp, synthetic construct
  source 1..24: mol_type = other DNA
ccaagtccaccaagcatcttgact

SEQ ID NO: 263 - DNA, 25 bp, synthetic construct
  source 1..25: mol_type = other DNA
cttcaaagcccttgacatacctcct

SEQ ID NO: 264 - DNA, 23 bp, synthetic construct
  source 1..23: mol_type = other DNA
ggaattgggtaggagggagaagc
